(19) United States
(12) Patent Application Publication
(10) Pub. No.: US 2023/0083558 A1
(43) Pub. Date: Mar. 16, 2023

(54) Treatment of Decreased Bone Mineral Density With Wnt Family Member 5B (WNT5B) Inhibitors

(71) Applicant: Regeneron Pharmaceuticals, Inc., Tarrytown, NY (US)

(72) Inventors: Jonas Bovijn, Tarrytown, NY (US); Olukayode Sosina, Tarrytown, NY (US); Luca Andrea Lotta, Tarrytown, NY (US); Aris Baras, Tarrytown, NY (US)

(21) Appl. No.: 17/855,466

(22) Filed: Jun. 30, 2022

Related U.S. Application Data
(60) Provisional application No. 63/218,209, filed on Jul. 2, 2021.

(51) Int. Cl. C12N 15/113; C12Q 1/6883

(52) U.S. Cl. CPC C12N 15/1136; C12Q 1/6883

(57) ABSTRACT

The present disclosure provides methods of treating subjects having decreased bone mineral density or at risk of developing decreased bone mineral density, methods of identifying subjects having an increased risk of developing decreased bone mineral density, methods of detecting Wnt Family Member 5B (WNT5B) variant nucleic acid molecules and variant polypeptides, and WNT5B variant nucleic acid molecules and variant polypeptides.

### REFERENCE TO SEQUENCE LISTING

[0001] This application includes a Sequence Listing submitted electronically as a text file named 18923807301SEQ, created on Jun. 30, 2022, with a size of 781 kilobytes. The Sequence Listing is incorporated herein by reference.

### FIELD

[0002] The present disclosure relates generally to the treatment of subjects having decreased bone mineral density or at risk of developing decreased bone mineral density with Wnt Family Member 5B (WNT5B) inhibitors, methods of identifying subjects having an increased risk of developing decreased bone mineral density, methods of detecting WNT5B variant nucleic acid molecules and variant polypeptides, and WNT5B variant nucleic acid molecules and WNT5B variant polypeptides.

### BACKGROUND

[0003] Degenerative conditions of the bone can make individuals susceptible to bone fractures, bone pain, and other complications. Two significant degenerative conditions of the bone are osteopenia and osteoporosis. Decreased bone mineral density (osteopenia) is a condition of the bone that is a precursor to osteoporosis and is characterized by a reduction in bone mass due to the loss of bone at a rate greater than new bone growth. Osteopenia manifests in bone having a mineral density lower than normal peak bone mineral density, but not as low as found in osteoporosis. Osteopenia can arise from a decrease in muscle activity, which may occur as the result of a bone fracture, bed rest, fracture immobilization, joint reconstruction, arthritis, and the like. Osteoporosis is a progressive disease characterized by a gradual bone weakening due to demineralization of the bone. Osteoporosis manifests in bones that are thin and brittle making them more susceptible to breaking. Hormone deficiencies related to menopause in women, and hormone deficiencies due to aging in both sexes contribute to degenerative conditions of the bone. In addition, insufficient dietary uptake of minerals essential to bone growth and maintenance are significant causes of bone loss.

[0004] The effects of osteopenia can be slowed, stopped, and even reversed by reproducing some of the effects of muscle use on the bone. This typically involves some application or simulation of the effects of mechanical stress on the bone. Compounds for the treatment of osteopenia or osteoporosis include pharmaceutical preparations that induce bone growth or retard bone demineralization, or mineral complexes that supplement the diet in an effort to replenish lost bone minerals. Low levels of estrogen in women, and low levels of androgen in men are the primary hormonal deficiencies that cause osteoporosis in the respective sexes. Other hormones such as the thyroid hormones, progesterone, and testosterone contribute to bone health. As such, the aforementioned hormonal compounds have been developed synthetically, or extracted from non-mammalian sources, and compounded into therapies for treating osteoporosis. Mineral supplement preparations containing iodine, zinc, manganese, boron, strontium, vitamin D3, calcium, magnesium, vitamin K, phosphorous, and copper have also been used to supplement insufficient dietary uptake of such minerals. However, long-term hormonal therapies have undesirable side effects such as increased cancer risk. Moreover, therapies using many synthetic or non-mammalian hormones have additional undesirable side effects, such as an increased risk of cardiovascular disorders, neurological disorders, or the exacerbation of pre-existing conditions.

[0005] WNT5 is a member of a family of secreted signaling proteins implicated in oncogenesis and in several developmental processes, including regulation of cell fate and patterning during embryogenesis. WNT5 acts as a ligand for members of the frizzled family of seven transmembrane receptors. WNT5 may function as a developmental protein, and may be a signaling molecule which affects the development of discrete regions of tissues.

### SUMMARY

[0006] The present disclosure provides methods of treating a subject having decreased bone mineral density or at risk of developing decreased bone mineral density, the methods comprising administering a WNT5B inhibitor to the subject.

[0007] The present disclosure also provides methods of treating a subject having osteopenia or at risk of developing osteopenia, the methods comprising administering a WNT5B inhibitor to the subject.

[0008] The present disclosure also provides methods of treating a subject having Type I osteoporosis or at risk of developing Type I osteoporosis, the methods comprising administering a WNT5B inhibitor to the subject.

[0009] The present disclosure also provides methods of treating a subject having Type II osteoporosis or at risk of developing Type II osteoporosis, the methods comprising administering a WNT5B inhibitor to the subject.

[0010] The present disclosure also provides methods of treating a subject having secondary osteoporosis or at risk of developing secondary osteoporosis, the methods comprising administering a WNT5B inhibitor to the subject.

[0011] The present disclosure also provides methods of treating a subject with a therapeutic agent that treats or prevents decreased bone mineral density, wherein the subject has decreased bone mineral density or is at risk of developing decreased bone mineral density, the methods comprising the steps of: determining whether the subject has a WNT5B variant nucleic acid molecule encoding a WNT5B predicted loss-of-function polypeptide by: obtaining or having obtained a biological sample from the subject; and performing or having performed a sequence analysis on the biological sample to determine if the subject has a genotype comprising the a WNT5B variant nucleic acid molecule encoding a WNT5B predicted loss-of-function polypeptide; and i) administering or continuing to administer the therapeutic agent that treats or prevents decreased bone mineral density in a standard dosage amount to a subject that is WNT5B reference, and/or administering a WNT5B inhibitor to the subject; or ii) administering or continuing to administer the therapeutic agent that treats or prevents decreased bone mineral density in an amount that is the same as or less than a standard dosage amount to a subject that is heterozygous for the WNT5B variant nucleic acid molecule encoding a WNT5B predicted loss-of-function polypeptide, and/or administering a WNT5B inhibitor to the subject; wherein the presence of a genotype having the WNT5B variant nucleic acid molecule encoding a WNT5B predicted loss-of-function polypeptide indicates the subject has a decreased risk of developing decreased bone mineral density.

[0012] The present disclosure also provides methods of identifying a subject having an increased risk of developing decreased bone mineral density, the methods comprising: determining or having determined the presence or absence of a WNT5B variant nucleic acid molecule encoding a WNT5B predicted loss-of-function polypeptide in a biological sample obtained from the subject; wherein the subject has an increased risk of developing decreased bone mineral density when the subject is WNT5B reference, and the subject has a decreased risk of developing decreased bone mineral density when the subject is heterozygous or homozygous for the WNT5B variant nucleic acid molecule encoding a WNT5B predicted loss-of-function polypeptide.

[0013] The present disclosure also provides methods of detecting a WNT5B variant nucleic acid molecule, or the complement thereof, encoding a WNT5B predicted loss-of-function polypeptide in a subject, the methods comprising assaying a biological sample obtained from the subject to determine whether a nucleic acid molecule in the biological sample is: i) a genomic nucleic acid molecule having a nucleotide sequence comprising: a thymine at a position corresponding to position 56,698 according to SEQ ID NO:2, or the complement thereof; an adenine at a position corresponding to position 58,170 according to SEQ ID NO:3, or the complement thereof; a thymine at a position corresponding to position 65,099 according to SEQ ID NO:4, or the complement thereof; an adenine at a position corresponding to position 65,099 according to SEQ ID NO:5, or the complement thereof; or a deletion of a TC dinucleotide at positions corresponding to positions 71,313-71,314 according to SEQ ID NO:6, or the complement thereof; ii) an mRNA molecule having a nucleotide sequence comprising: a uracil at a position corresponding to position 242 according to SEQ ID NO:15, or the complement thereof; a uracil at a position corresponding to position 145 according to SEQ ID NO:16, or the complement thereof; a uracil at a position corresponding to position 198 according to SEQ ID NO:17, or the complement thereof; a uracil at a position corresponding to position 40 according to SEQ ID NO:18, or the complement thereof; a uracil at a position corresponding to position 145 according to SEQ ID NO:19, or the complement thereof; a uracil at a position corresponding to position 183 according to SEQ ID NO:20, or the complement thereof; a uracil at a position corresponding to position 543 according to SEQ ID NO:21, or the complement thereof; an adenine at a position corresponding to position 491 according to SEQ ID NO:22, or the complement thereof; an adenine at a position corresponding to position 394 according to SEQ ID NO:23, or the complement thereof; an adenine at a position corresponding to position 447 according to SEQ ID NO:24, or the complement thereof; an adenine at a position corresponding to position 289 according to SEQ ID NO:25, or the complement thereof; an adenine at a position corresponding to position 394 according to SEQ ID NO:26, or the complement thereof; an adenine at a position corresponding to position 432 according to SEQ ID NO:27, or the complement thereof; an adenine at a position corresponding to position 792 according to SEQ ID NO:28, or the complement thereof; an adenine at a position corresponding to position 254 according to SEQ ID NO:29, or the complement thereof; a uracil at a position corresponding to position 642 according to SEQ ID NO:30, or the complement thereof; a uracil at a position corresponding to position 545 according to SEQ ID NO:31, or the complement thereof; a uracil at a position corresponding to position 598 according to SEQ ID NO:32, or the complement thereof; a uracil at a position corresponding to position 545 according to SEQ ID NO:33, or the complement thereof; a uracil at a position corresponding to position 583 according to SEQ ID NO:34, or the complement thereof; a uracil at a position corresponding to position 943 according to SEQ ID NO:35, or the complement thereof; a uracil at a position corresponding to position 405 according to SEQ ID NO:36, or the complement thereof; an adenine at a position corresponding to position 642 according to SEQ ID NO:37, or the complement thereof; an adenine at a position corresponding to position 545 according to SEQ ID NO:38, or the complement thereof; an adenine at a position corresponding to position 598 according to SEQ ID NO:39, or the complement thereof; an adenine at a position corresponding to position 545 according to SEQ ID NO:40, or the complement thereof; an adenine at a position corresponding to position 583 according to SEQ ID NO:41, or the complement thereof; an adenine at a position corresponding to position 943 according to SEQ ID NO:42, or the complement thereof; an adenine at a position corresponding to position 405 according to SEQ ID NO:43, or the complement thereof; a deletion of a UC dinucleotide at positions corresponding to positions 1,039-1,040 according to SEQ ID NO:44, or the complement thereof; a deletion of a UC dinucleotide at positions corresponding to positions 942-943 according to SEQ ID NO:45, or the complement thereof; a deletion of a UC dinucleotide at positions corresponding to positions 995-996 according to SEQ ID NO:46, or the complement thereof; a deletion of a UC dinucleotide at positions corresponding to positions 942-943 according to SEQ ID NO:47, or the complement thereof; a deletion of a UC dinucleotide at positions corresponding to positions 980-981 according to SEQ ID NO:48, or the complement thereof; or a deletion of a UC dinucleotide at positions corresponding to positions 802-803 according to SEQ ID NO:49, or the complement thereof; or iii) a cDNA molecule produced from an mRNA molecule in the biological sample, wherein the cDNA molecule has a nucleotide sequence comprising: a thymine at a position corresponding to position 242 according to SEQ ID NO:58, or the complement thereof; a thymine at a position corresponding to position 145 according to SEQ ID NO:59, or the complement thereof; a thymine at a position corresponding to position 198 according to SEQ ID NO:60, or the complement thereof; a thymine at a position corresponding to position 40 according to SEQ ID NO:61, or the complement thereof; a thymine at a position corresponding to position 145 according to SEQ ID NO:62, or the complement thereof; a thymine at a position corresponding to position 183 according to SEQ ID NO:63, or the complement thereof; a thymine at a position corresponding to position 543 according to SEQ ID NO:64, or the complement thereof; an adenine at a position corresponding to position 491 according to SEQ ID NO:65, or the complement thereof; an adenine at a position corresponding to position 394 according to SEQ ID NO:66, or the complement thereof; an adenine at a position corresponding to position 447 according to SEQ ID NO:67, or the complement thereof; an adenine at a position corresponding to position 289 according to SEQ ID NO:68, or the complement thereof; an adenine at a position corresponding to position 394 according to SEQ ID NO:69, or the complement thereof; an adenine at a position corresponding to position 432 according to SEQ ID NO:70, or the complement thereof; an adenine at a position corresponding to position 792 according to SEQ ID NO:71, or the complement thereof; an adenine at a position corresponding to position 254 according to SEQ ID NO:72, or the complement thereof; a thymine at a position corresponding to position 642 according to SEQ ID NO:73, or the complement thereof; a thymine at a position corresponding to position 545 according to SEQ ID NO:74, or the complement thereof; a thymine at a position corresponding to position 598 according to SEQ ID NO:75, or the complement thereof; a thymine at a position corresponding to position 545 according to SEQ ID NO:76, or the complement thereof; a thymine at a position corresponding to position 583 according to SEQ ID NO:77, or the complement thereof; a thymine at a position corresponding to position 943 according to SEQ ID NO:78, or the complement thereof; a thymine at a position corresponding to position 405 according to SEQ ID NO:79, or the complement thereof; an adenine at a position corresponding to position 642 according to SEQ ID NO:80, or the complement thereof; an adenine at a position corresponding to position 545 according to SEQ ID NO:81, or the complement thereof; an adenine at a position corresponding to position 598 according to SEQ ID NO:82, or the complement thereof; an adenine at a position corresponding to position 545 according to SEQ ID NO:83, or the complement thereof; an adenine at a position corresponding to position 583 according to SEQ ID NO:84, or the complement thereof; an adenine at a position corresponding to position 943 according to SEQ ID NO:85, or the complement thereof; an adenine at a position corresponding to position 405 according to SEQ ID NO:86, or the complement thereof; a deletion of a TC dinucleotide at positions corresponding to positions 1,039-1,040 according to SEQ ID NO:87, or the complement thereof; a deletion of a TC dinucleotide at positions corresponding to positions 942-943 according to SEQ ID NO:88, or the complement thereof; a deletion of a TC dinucleotide at positions corresponding to positions 995-996 according to SEQ ID NO:89, or the complement thereof; a deletion of a TC dinucleotide at positions corresponding to positions 942-943 according to SEQ ID NO:90, or the complement thereof; a deletion of a TC dinucleotide at positions corresponding to positions 980-981 according to SEQ ID NO:91, or the complement thereof; or a deletion of a TC dinucleotide at positions corresponding to positions 802-803 according to SEQ ID NO:92, or the complement thereof.

[0014] The present disclosure also provides isolated alteration-specific probes or alteration-specific primers comprising at least about 15 nucleotides, wherein the alteration-specific probes or alteration-specific primers comprise a nucleotide sequence which is complementary to the nucleotide sequence of a portion of a WNT5B nucleic acid molecule encoding a WNT5B predicted loss-of-function polypeptide, or the complement of, wherein the portion comprises a position corresponding to: i) position 58,170 according to SEQ ID NO:3, or the complement thereof; position 491 according to SEQ ID NO:22, or the complement thereof; position 394 according to SEQ ID NO:23, or the complement thereof; position 447 according to SEQ ID NO:24, or the complement thereof; position 289 according to SEQ ID NO:25, or the complement thereof; position 394 according to SEQ ID NO:26, or the complement thereof; position 432 according to SEQ ID NO:27, or the complement thereof; position 792 according to SEQ ID NO:28, or the complement thereof; position 254 according to SEQ ID NO:29, or the complement thereof; position 491 according to SEQ ID NO:65, or the complement thereof; position 394 according to SEQ ID NO:66, or the complement thereof; position 447 according to SEQ ID NO:67, or the complement thereof; position 289 according to SEQ ID NO:68, or the complement thereof; position 394 according to SEQ ID NO:69, or the complement thereof; position 432 according to SEQ ID NO:70, or the complement thereof; position 792 according to SEQ ID NO:71, or the complement thereof; position 254 according to SEQ ID NO:72, or the complement thereof; or ii) positions 71,313-71,314 according to SEQ ID NO:6, or the complement thereof; positions 1,039-1,040 according to SEQ ID NO:44, or the complement thereof; positions 942-943 according to SEQ ID NO:45, or the complement thereof; positions 995-996 according to SEQ ID NO:46, or the complement thereof; positions 942-943 according to SEQ ID NO:47, or the complement thereof; positions 980-981 according to SEQ ID NO:48, or the complement thereof; positions 802-803 according to SEQ ID NO:49, or the complement thereof; positions 1,039-1,040 according to SEQ ID NO:87, or the complement thereof; positions 942-943 according to SEQ ID NO:88, or the complement thereof; positions 995-996 according to SEQ ID NO:89, or the complement thereof; positions 942-943 according to SEQ ID NO:90, or the complement thereof; positions 980-981 according to SEQ ID NO:91, or the complement thereof; or positions 802-803 according to SEQ ID NO:92, or the complement thereof.

[0015] The present disclosure also provides molecular complexes comprising an alteration-specific primer or an alteration-specific probe hybridized to a WNT5B genomic nucleic acid molecule encoding a WNT5B predicted loss-of-function polypeptide, wherein the alteration-specific primer or the alteration-specific probe is hybridized to the WNT5B genomic nucleic acid molecule at a position corresponding to: position 58,170 according to SEQ ID NO:3, or the complement thereof; or positions 71,313-71,314 according to SEQ ID NO:6, or the complement thereof.

[0016] The present disclosure also provides molecular complexes comprising an alteration-specific primer or an alteration-specific probe hybridized to a WNT5B mRNA molecule encoding a WNT5B predicted loss-of-function polypeptide, wherein the alteration-specific primer or the alteration-specific probe is hybridized to the WNT5B mRNA molecule at a position corresponding to: position 491 according to SEQ ID NO:22, or the complement thereof; position 394 according to SEQ ID NO:23, or the complement thereof; position 447 according to SEQ ID NO:24, or the complement thereof; position 289 according to SEQ ID NO:25, or the complement thereof; position 394 according to SEQ ID NO:26, or the complement thereof; position 432 according to SEQ ID NO:27, or the complement thereof; position 792 according to SEQ ID NO:28, or the complement thereof; position 254 according to SEQ ID NO:29, or the complement thereof; positions 1,039-1,040 according to SEQ ID NO:44, or the complement thereof; positions 942-943 according to SEQ ID NO:45, or the complement thereof; positions 995-996 according to SEQ ID NO:46, or the complement thereof; positions 942-943 according to SEQ ID NO:47, or the complement thereof; positions 980-981 according to SEQ ID NO:48, or the complement thereof; or positions 802-803 according to SEQ ID NO:49, or the complement thereof.

[0017] The present disclosure also provides molecular complexes comprising an alteration-specific primer or an alteration-specific probe hybridized to a WNT5B cDNA molecule encoding a WNT5B predicted loss-of-function polypeptide, wherein the alteration-specific primer or the alteration-specific probe is hybridized to the WNT5B cDNA molecule at a position corresponding to: position 491 according to SEQ ID NO:65, or the complement thereof; position 394 according to SEQ ID NO:66, or the complement thereof; position 447 according to SEQ ID NO:67, or the complement thereof; position 289 according to SEQ ID NO:68, or the complement thereof; position 394 according to SEQ ID NO:69, or the complement thereof; position 432 according to SEQ ID NO:70, or the complement thereof; position 792 according to SEQ ID NO:71, or the complement thereof; position 254 according to SEQ ID NO:72, or the complement thereof; positions 1,039-1,040 according to SEQ ID NO:87, or the complement thereof; positions 942-943 according to SEQ ID NO:88, or the complement thereof; positions 995-996 according to SEQ ID NO:89, or the complement thereof; positions 942-943 according to SEQ ID NO:90, or the complement thereof; positions 980-981 according to SEQ ID NO:91, or the complement thereof; or positions 802-803 according to SEQ ID NO:92, or the complement thereof.

[0018] The present disclosure also provides isolated nucleic acid molecules comprising a nucleotide sequence encoding a WNT5B predicted loss-of-function polypeptide, or the complement thereof, wherein the polypeptide comprises: a truncation at a position corresponding to position 83 according to SEQ ID NO:96; a truncation at a position corresponding to position 83 according to SEQ ID NO:97; a truncation at a position corresponding to position 113 according to SEQ ID NO:98; a frameshift mutation at a position corresponding to position 266 according to SEQ ID NO:103.

[0019] The present disclosure also provides isolated genomic nucleic acid molecules comprising a nucleotide sequence encoding a WNT5B predicted loss-of-function polypeptide, wherein the nucleotide sequence comprises: an adenine at a position corresponding to position 58,170 according to SEQ ID NO:3, or the complement thereof; or a deletion of a TC dinucleotide at positions corresponding to positions 71,313-71,314 according to SEQ ID NO:6, or the complement thereof.

[0020] The present disclosure also provides isolated mRNA molecules comprising a nucleotide sequence encoding a WNT5B predicted loss-of-function polypeptide, wherein the nucleotide sequence comprises: an adenine at a position corresponding to position 491 according to SEQ ID NO:22, or the complement thereof; an adenine at a position corresponding to position 394 according to SEQ ID NO:23, or the complement thereof; an adenine at a position corresponding to position 447 according to SEQ ID NO:24, or the complement thereof; an adenine at a position corresponding to position 289 according to SEQ ID NO:25, or the complement thereof; an adenine at a position corresponding to position 394 according to SEQ ID NO:26, or the complement thereof; an adenine at a position corresponding to position 432 according to SEQ ID NO:27, or the complement thereof; an adenine at a position corresponding to position 792 according to SEQ ID NO:28, or the complement thereof; an adenine at a position corresponding to position 254 according to SEQ ID NO:29, or the complement thereof; a deletion of a UC dinucleotide at positions corresponding to positions 1,039-1,040 according to SEQ ID NO:44, or the complement thereof; a deletion of a UC dinucleotide at positions corresponding to positions 942-943 according to SEQ ID NO:45, or the complement thereof; a deletion of a UC dinucleotide at positions corresponding to positions 995-996 according to SEQ ID NO:46, or the complement thereof; a deletion of a UC dinucleotide at positions corresponding to positions 942-943 according to SEQ ID NO:47, or the complement thereof; a deletion of a UC dinucleotide at positions corresponding to positions 980-981 according to SEQ ID NO:48, or the complement thereof; or a deletion of a UC dinucleotide at positions corresponding to positions 802-803 according to SEQ ID NO:49, or the complement thereof.

[0021] The present disclosure also provides cDNA molecules comprising a nucleotide sequence encoding a WNT5B predicted loss-of-function polypeptide, wherein the nucleotide sequence comprises: an adenine at a position corresponding to position 491 according to SEQ ID NO:65, or the complement thereof; an adenine at a position corresponding to position 394 according to SEQ ID NO:66, or the complement thereof; an adenine at a position corresponding to position 447 according to SEQ ID NO:67, or the complement thereof; an adenine at a position corresponding to position 289 according to SEQ ID NO:68, or the complement thereof; an adenine at a position corresponding to position 394 according to SEQ ID NO:69, or the complement thereof; an adenine at a position corresponding to position 432 according to SEQ ID NO:70, or the complement thereof; an adenine at a position corresponding to position 792 according to SEQ ID NO:71, or the complement thereof; an adenine at a position corresponding to position 254 according to SEQ ID NO:72, or the complement thereof; a deletion of a TC dinucleotide at positions corresponding to positions 1,039-1,040 according to SEQ ID NO:87, or the complement thereof; a deletion of a TC dinucleotide at positions corresponding to positions 942-943 according to SEQ ID NO:88, or the complement thereof; a deletion of a TC dinucleotide at positions corresponding to positions 995-996 according to SEQ ID NO:89, or the complement thereof; a deletion of a TC dinucleotide at positions corresponding to positions 942-943 according to SEQ ID NO:90, or the complement thereof; a deletion of a TC dinucleotide at positions corresponding to positions 980-981 according to SEQ ID NO:91, or the complement thereof; or a deletion of a TC dinucleotide at positions corresponding to positions 802-803 according to SEQ ID NO:92, or the complement thereof.

[0022] The present disclosure also provides isolated WNT5B predicted loss-of-function polypeptides having an amino acid sequence at least about 90% identical to: SEQ ID NO:96, wherein the polypeptide comprises a truncation at a position corresponding to position 83 according to SEQ ID NO:96; SEQ ID NO:97, wherein the polypeptide comprises a truncation at a position corresponding to position 83 according to SEQ ID NO:97; SEQ ID NO:98, wherein the polypeptide comprises a truncation at a position corresponding to position 113 according to SEQ ID NO:98; SEQ ID NO:103, wherein the polypeptide comprises a frameshift mutation at a position corresponding to position 266 according to SEQ ID NO:103.

[0023] The present disclosure also provides therapeutic agents that treat or prevent decreased bone mineral density for use in the treatment or prevention of decreased bone mineral density (or for use in the preparation of a medicament for treating or preventing decreased bone mineral density) in a subject identified as having: i) a genomic nucleic acid molecule encoding a WNT5B predicted loss-of-function polypeptide, or the complement thereof, wherein the genomic nucleic acid molecule has a nucleotide sequence comprising: a thymine at a position corresponding to position 56,698 according to SEQ ID NO:2, or the complement thereof; an adenine at a position corresponding to position 58,170 according to SEQ ID NO:3, or the complement thereof; a thymine at a position corresponding to position 65,099 according to SEQ ID NO:4, or the complement thereof; an adenine at a position corresponding to position 65,099 according to SEQ ID NO:5, or the complement thereof; or a deletion of a TC dinucleotide at positions corresponding to positions 71,313-71,314 according to SEQ ID NO:6, or the complement thereof; ii) an mRNA molecule having a nucleotide sequence encoding a WNT5B predicted loss-of-function polypeptide, wherein the nucleotide sequence comprises: a uracil at a position corresponding to position 242 according to SEQ ID NO:15, or the complement thereof; a uracil at a position corresponding to position 145 according to SEQ ID NO:16, or the complement thereof; a uracil at a position corresponding to position 198 according to SEQ ID NO:17, or the complement thereof; a uracil at a position corresponding to position 40 according to SEQ ID NO:18, or the complement thereof; a uracil at a position corresponding to position 145 according to SEQ ID NO:19, or the complement thereof; a uracil at a position corresponding to position 183 according to SEQ ID NO:20, or the complement thereof; a uracil at a position corresponding to position 543 according to SEQ ID NO:21, or the complement thereof; an adenine at a position corresponding to position 491 according to SEQ ID NO:22, or the complement thereof; an adenine at a position corresponding to position 394 according to SEQ ID NO:23, or the complement thereof; an adenine at a position corresponding to position 447 according to SEQ ID NO:24, or the complement thereof; an adenine at a position corresponding to position 289 according to SEQ ID NO:25, or the complement thereof; an adenine at a position corresponding to position 394 according to SEQ ID NO:26, or the complement thereof; an adenine at a position corresponding to position 432 according to SEQ ID NO:27, or the complement thereof; an adenine at a position corresponding to position 792 according to SEQ ID NO:28, or the complement thereof; an adenine at a position corresponding to position 254 according to SEQ ID NO:29, or the complement thereof; a uracil at a position corresponding to position 642 according to SEQ ID NO:30, or the complement thereof; a uracil at a position corresponding to position 545 according to SEQ ID NO:31, or the complement thereof; a uracil at a position corresponding to position 598 according to SEQ ID NO:32, or the complement thereof; a uracil at a position corresponding to position 545 according to SEQ ID NO:33, or the complement thereof; a uracil at a position corresponding to position 583 according to SEQ ID NO:34, or the complement thereof; a uracil at a position corresponding to position 943 according to SEQ ID NO:35, or the complement thereof; a uracil at a position corresponding to position 405 according to SEQ ID NO:36, or the complement thereof; an adenine at a position corresponding to position 642 according to SEQ ID NO:37, or the complement thereof; an adenine at a position corresponding to position 545 according to SEQ ID NO:38, or the complement thereof; an adenine at a position corresponding to position 598 according to SEQ ID NO:39, or the complement thereof; an adenine at a position corresponding to position 545 according to SEQ ID NO:40, or the complement thereof; an adenine at a position corresponding to position 583 according to SEQ ID NO:41, or the complement thereof; an adenine at a position corresponding to position 943 according to SEQ ID NO:42, or the complement thereof; an adenine at a position corresponding to position 405 according to SEQ ID NO:43, or the complement thereof; a deletion of a UC dinucleotide at positions corresponding to positions 1,039-1,040 according to SEQ ID NO:44, or the complement thereof; a deletion of a UC dinucleotide at positions corresponding to positions 942-943 according to SEQ ID NO:45, or the complement thereof; a deletion of a UC dinucleotide at positions corresponding to positions 995-996 according to SEQ ID NO:46, or the complement thereof; a deletion of a UC dinucleotide at positions corresponding to positions 942-943 according to SEQ ID NO:47, or the complement thereof; a deletion of a UC dinucleotide at positions corresponding to positions 980-981 according to SEQ ID NO:48, or the complement thereof; or a deletion of a UC dinucleotide at positions corresponding to positions 802-803 according to SEQ ID NO:49, or the complement thereof; or iii) a cDNA molecule having a nucleotide sequence encoding a WNT5B predicted loss-of-function polypeptide, wherein the nucleotide sequence comprises: a thymine at a position corresponding to position 242 according to SEQ ID NO:58, or the complement thereof; a thymine at a position corresponding to position 145 according to SEQ ID NO:59, or the complement thereof; a thymine at a position corresponding to position 198 according to SEQ ID NO:60, or the complement thereof; a thymine at a position corresponding to position 40 according to SEQ ID NO:61, or the complement thereof; a thymine at a position corresponding to position 145 according to SEQ ID NO:62, or the complement thereof; a thymine at a position corresponding to position 183 according to SEQ ID NO:63, or the complement thereof; a thymine at a position corresponding to position 543 according to SEQ ID NO:64, or the complement thereof; an adenine at a position corresponding to position 491 according to SEQ ID NO:65, or the complement thereof; an adenine at a position corresponding to position 394 according to SEQ ID NO:66, or the complement thereof; an adenine at a position corresponding to position 447 according to SEQ ID NO:67, or the complement thereof; an adenine at a position corresponding to position 289 according to SEQ ID NO:68, or the complement thereof; an adenine at a position corresponding to position 394 according to SEQ ID NO:69, or the complement thereof; an adenine at a position corresponding to position 432 according to SEQ ID NO:70, or the complement thereof; an adenine at a position corresponding to position 792 according to SEQ ID NO:71, or the complement thereof; an adenine at a position corresponding to position 254 according to SEQ ID NO:72, or the complement thereof; a thymine at a position corresponding to position 642 according to SEQ ID NO:73, or the complement thereof; a thymine at a position corresponding to position 545 according to SEQ ID NO:74, or the complement thereof; a thymine at a position corresponding to position 598 according to SEQ ID NO:75, or the complement thereof; a thymine at a position corresponding to position 545 according to SEQ ID NO:76, or the complement thereof; a thymine at a position corresponding to position 583 according to SEQ ID NO:77, or the complement thereof; a thymine at a position corresponding to position 943 according to SEQ ID NO:78, or the complement thereof; a thymine at a position corresponding to position 405 according to SEQ ID NO:79, or the complement thereof; an adenine at a position corresponding to position 642 according to SEQ ID NO:80, or the complement thereof; an adenine at a position corresponding to position 545 according to SEQ ID NO:81, or the complement thereof; an adenine at a position corresponding to position 598 according to SEQ ID NO:82, or the complement thereof; an adenine at a position corresponding to position 545 according to SEQ ID NO:83, or the complement thereof; an adenine at a position corresponding to position 583 according to SEQ ID NO:84, or the complement thereof; an adenine at a position corresponding to position 943 according to SEQ ID NO:85, or the complement thereof; an adenine at a position corresponding to position 405 according to SEQ ID NO:86, or the complement thereof; a deletion of a TC dinucleotide at positions corresponding to positions 1,039-1,040 according to SEQ ID NO:87, or the complement thereof; a deletion of a TC dinucleotide at positions corresponding to positions 942-943 according to SEQ ID NO:88, or the complement thereof; a deletion of a TC dinucleotide at positions corresponding to positions 995-996 according to SEQ ID NO:89, or the complement thereof; a deletion of a TC dinucleotide at positions corresponding to positions 942-943 according to SEQ ID NO:90, or the complement thereof; a deletion of a TC dinucleotide at positions corresponding to positions 980-981 according to SEQ ID NO:91, or the complement thereof; or a deletion of a TC dinucleotide at positions corresponding to positions 802-803 according to SEQ ID NO:92, or the complement thereof.

[0024] The present disclosure also provides WNT5B inhibitors for use in the treatment or prevention of decreased bone mineral density (or for use in the preparation of a medicament for treating or preventing decreased bone mineral density) in a subject that: a) is reference for a WNT5B genomic nucleic acid molecule, a WNT5B mRNA molecule, or a WNT5B cDNA molecule; or b) is heterozygous for: i) a genomic nucleic acid molecule encoding a WNT5B predicted loss-of-function polypeptide, or the complement thereof, wherein the genomic nucleic acid molecule has a nucleotide sequence comprising: a thymine at a position corresponding to position 56,698 according to SEQ ID NO:2, or the complement thereof; an adenine at a position corresponding to position 58,170 according to SEQ ID NO:3, or the complement thereof; a thymine at a position corresponding to position 65,099 according to SEQ ID NO:4, or the complement thereof; an adenine at a position corresponding to position 65,099 according to SEQ ID NO:5, or the complement thereof; or a deletion of a TC dinucleotide at positions corresponding to positions 71,313-71,314 according to SEQ ID NO:6, or the complement thereof; ii) an mRNA molecule encoding a WNT5B predicted loss-of-function polypeptide, or the complement thereof, wherein the mRNA molecule has a nucleotide sequence comprising: a uracil at a position corresponding to position 242 according to SEQ ID NO:15, or the complement thereof; a uracil at a position corresponding to position 145 according to SEQ ID NO:16, or the complement thereof; a uracil at a position corresponding to position 198 according to SEQ ID NO:17, or the complement thereof; a uracil at a position corresponding to position 40 according to SEQ ID NO:18, or the complement thereof; a uracil at a position corresponding to position 145 according to SEQ ID NO:19, or the complement thereof; a uracil at a position corresponding to position 183 according to SEQ ID NO:20, or the complement thereof; a uracil at a position corresponding to position 543 according to SEQ ID NO:21, or the complement thereof; an adenine at a position corresponding to position 491 according to SEQ ID NO:22, or the complement thereof; an adenine at a position corresponding to position 394 according to SEQ ID NO:23, or the complement thereof; an adenine at a position corresponding to position 447 according to SEQ ID NO:24, or the complement thereof; an adenine at a position corresponding to position 289 according to SEQ ID NO:25, or the complement thereof; an adenine at a position corresponding to position 394 according to SEQ ID NO:26, or the complement thereof; an adenine at a position corresponding to position 432 according to SEQ ID NO:27, or the complement thereof; an adenine at a position corresponding to position 792 according to SEQ ID NO:28, or the complement thereof; an adenine at a position corresponding to position 254 according to SEQ ID NO:29, or the complement thereof; a uracil at a position corresponding to position 642 according to SEQ ID NO:30, or the complement thereof; a uracil at a position corresponding to position 545 according to SEQ ID NO:31, or the complement thereof; a uracil at a position corresponding to position 598 according to SEQ ID NO:32, or the complement thereof; a uracil at a position corresponding to position 545 according to SEQ ID NO:33, or the complement thereof; a uracil at a position corresponding to position 583 according to SEQ ID NO:34, or the complement thereof; a uracil at a position corresponding to position 943 according to SEQ ID NO:35, or the complement thereof; a uracil at a position corresponding to position 405 according to SEQ ID NO:36, or the complement thereof; an adenine at a position corresponding to position 642 according to SEQ ID NO:37, or the complement thereof; an adenine at a position corresponding to position 545 according to SEQ ID NO:38, or the complement thereof; an adenine at a position corresponding to position 598 according to SEQ ID NO:39, or the complement thereof; an adenine at a position corresponding to position 545 according to SEQ ID NO:40, or the complement thereof; an adenine at a position corresponding to position 583 according to SEQ ID NO:41, or the complement thereof; an adenine at a position corresponding to position 943 according to SEQ ID NO:42, or the complement thereof; an adenine at a position corresponding to position 405 according to SEQ ID NO:43, or the complement thereof; a deletion of a UC dinucleotide at positions corresponding to positions 1,039-1,040 according to SEQ ID NO:44, or the complement thereof; a deletion of a UC dinucleotide at positions corresponding to positions 942-943 according to SEQ ID NO:45, or the complement thereof; a deletion of a UC dinucleotide at positions corresponding to positions 995-996 according to SEQ ID NO:46, or the complement thereof; a deletion of a UC dinucleotide at positions corresponding to positions 942-943 according to SEQ ID NO:47, or the complement thereof; a deletion of a UC dinucleotide at positions corresponding to positions 980-981 according to SEQ ID NO:48, or the complement thereof; or a deletion of a UC dinucleotide at positions corresponding to positions 802-803 according to SEQ ID NO:49, or the complement thereof; or iii) a cDNA molecule encoding a WNT5B predicted loss-of-function polypeptide, or the complement thereof, wherein the cDNA molecule has a nucleotide sequence comprising: a thymine at a position corresponding to position 242 according to SEQ ID NO:58, or the complement thereof; a thymine at a position corresponding to position 145 according to SEQ ID NO:59, or the complement thereof; a thymine at a position corresponding to position 198 according to SEQ ID NO:60, or the complement thereof; a thymine at a position corresponding to position 40 according to SEQ ID NO:61, or the complement thereof; a thymine at a position corresponding to position 145 according to SEQ ID NO:62, or the complement thereof; a thymine at a position corresponding to position 183 according to SEQ ID NO:63, or the complement thereof; a thymine at a position corresponding to position 543 according to SEQ ID NO:64, or the complement thereof; an adenine at a position corresponding to position 491 according to SEQ ID NO:65, or the complement thereof; an adenine at a position corresponding to position 394 according to SEQ ID NO:66, or the complement thereof; an adenine at a position corresponding to position 447 according to SEQ ID NO:67, or the complement thereof; an adenine at a position corresponding to position 289 according to SEQ ID NO:68, or the complement thereof; an adenine at a position corresponding to position 394 according to SEQ ID NO:69, or the complement thereof; an adenine at a position corresponding to position 432 according to SEQ ID NO:70, or the complement thereof; an adenine at a position corresponding to position 792 according to SEQ ID NO:71, or the complement thereof; an adenine at a position corresponding to position 254 according to SEQ ID NO:72, or the complement thereof; a thymine at a position corresponding to position 642 according to SEQ ID NO:73, or the complement thereof; a thymine at a position corresponding to position 545 according to SEQ ID NO:74, or the complement thereof; a thymine at a position corresponding to position 598 according to SEQ ID NO:75, or the complement thereof; a thymine at a position corresponding to position 545 according to SEQ ID NO:76, or the complement thereof; a thymine at a position corresponding to position 583 according to SEQ ID NO:77, or the complement thereof; a thymine at a position corresponding to position 943 according to SEQ ID NO:78, or the complement thereof; a thymine at a position corresponding to position 405 according to SEQ ID NO:79, or the complement thereof; an adenine at a position corresponding to position 642 according to SEQ ID NO:80, or the complement thereof; an adenine at a position corresponding to position 545 according to SEQ ID NO:81, or the complement thereof; an adenine at a position corresponding to position 598 according to SEQ ID NO:82, or the complement thereof; an adenine at a position corresponding to position 545 according to SEQ ID NO:83, or the complement thereof; an adenine at a position corresponding to position 583 according to SEQ ID NO:84, or the complement thereof; an adenine at a position corresponding to position 943 according to SEQ ID NO:85, or the complement thereof; an adenine at a position corresponding to position 405 according to SEQ ID NO:86, or the complement thereof; a deletion of a TC dinucleotide at positions corresponding to positions 1,039-1,040 according to SEQ ID NO:87, or the complement thereof; a deletion of a TC dinucleotide at positions corresponding to positions 942-943 according to SEQ ID NO:88, or the complement thereof; a deletion of a TC dinucleotide at positions corresponding to positions 995-996 according to SEQ ID NO:89, or the complement thereof; a deletion of a TC dinucleotide at positions corresponding to positions 942-943 according to SEQ ID NO:90, or the complement thereof; a deletion of a TC dinucleotide at positions corresponding to positions 980-981 according to SEQ ID NO:91, or the complement thereof; or a deletion of a TC dinucleotide at positions corresponding to positions 802-803 according to SEQ ID NO:92, or the complement thereof.

### BRIEF DESCRIPTION OF THE DRAWINGS

[0025] The accompanying figures, which are incorporated in and constitute a part of this specification, illustrate several features of the present disclosure.

[0026] FIG. 1 shows association of rare predicted loss-of-function (pLoF) and predicted deleterious variants in WNT5B with higher estimated bone mineral density (eBMD). Estimates of association are for the burden of WNT5B pLoF or predicted deleterious variants with alternative allele frequency (AAF)<1%, and were derived in United Kingdom Biobank (UKB). Variants were predicted to be deleterious by five out five algorithms (see Genotype Data below for description of in silico algorithms used to characterize variant deleteriousness). Genotype counts indicates the number of individuals in each of three genotype categories: RR indicates individuals carrying no rare pLoF or predicted deleterious variants in WNT5B; RA indicates individuals carrying a rare pLoF or predicted deleterious variant in a single WNT5B allele; AA indicates individuals carrying rare pLoF or predicted deleterious variants in both WNT5B alleles. AAF indicates the alternative allele frequency of variants included in this analysis. g/cm², grams per centimeter squared; SD, standard deviation; CI, confidence interval.

[0027] FIG. 2 shows association of rare pLoF variants in WNT5B with higher eBMD. Estimates of association pertain to the burden of WNT5B pLoF variants with AAF<1% and were derived in UKB. Genotype counts indicates the number of individuals in each of three genotype categories: RR indicates individuals carrying no rare pLoF variants in WNT5B; RA indicates individuals carrying at least one rare pLoF in a single WNT5B allele; AA indicates individuals carrying any rare pLoF variants in both WNT5B alleles. AAF, alternative allele frequency of variants included in this analysis. g/cm², grams per centimeter squared; SD, standard deviation; CI, confidence interval.

[0028] FIG. 3 shows rare pLoF or predicted deleterious variants in WNT5B are associated with protection against fracture. This analysis examined the association of the burden of pLoF or predicted deleterious missense WNT5B variants with an AAF below 1%, and the burden of pLoF variants in WNT5B with an AAF below 1%, with fracture. These results were derived using inverse-variance weighted meta-analysis of estimates for fracture risk derived in the UKB, Geisinger Health System (GHS), University of Pennsylvania Medicine BioBank (PMBB), The Mount Sinai BioMe cohort (Sinai), and Malmo Diet and Cancer Study (MDCS) cohorts. Genotype counts indicates the number of individuals in each of three genotype categories: RR indicates individuals carrying no rare pLoF variants in WNT5B; RA indicates individuals carrying at least one rare pLoF in a single WNT5B allele; AA indicates individuals carrying any rare pLoF variants in both WNT5B alleles. AAF, alternative allele frequency of variants included in this analysis. CI, confidence interval.

[0029] FIG. 4 shows WNT5B pLoF or predicted deleterious variants identified by whole exome sequencing (WES) and included in the gene burden association analysis. The genomic coordinates column indicates the chromosome, physical genomic position in base pairs, reference allele, and alternative allele for each variant, according to build 38 of the Human Genome sequence by the Human Genome Reference Consortium. Coding DNA and protein changes are provided according to the Human Genome Variation Society nomenclature, and refer to the three (ENST00000310594, ENST00000397196, ENST00000537031) or four (ENST00000310594, ENST00000397196, ENST00000537031, ENST00000542408) WNT5B transcripts annotated in the Ensembl database (Howe et al., Nuc. Acids Res., 2020, 49(D1), D884-D891). AAF, alternative allele frequency of variants included in this analysis; pLoF, predicted loss-of-function.

[0030] FIG. 5 shows definitions of fracture outcomes in UKB, GHS, PMBB, Sinai, and MDCS cohorts. Participants were excluded from the case and control groups if they had a code indicating a potential fracture in the presence of neoplastic disease (ICD10: M907; ICD10-CM: M845). ICD10 indicates the 10th revision of the International Statistical Classification of Diseases and Related Health Problems; ICD10CM indicates the 10th revision of the International Statistical Classification of Diseases and Related Health Problems—Clinical Modification; ICD9CM indicates the 9th revision of the International Statistical Classification of Diseases and Related Health Problems—Clinical Modification. OPCS4 indicates Office of Population Censuses and Surveys (OPCS) Classification of Interventions and Procedures version 4 as used in the UK Biobank (UKB); f.20002 indicates self-reported non-cancer illness codes as used in UKB. f.20004 indicates self-reported medical procedures as used in UKB. NOMESCO and NOMESCO (Op6) indicates Nordic Medico-Statistical Committee procedure codes used in MDCS.

[0031] FIG. 6 shows case and control counts for fracture outcomes in UKB, GHS, PMBB, Sinai, and MDCS cohorts. UKB, UK Biobank; GHS, MyCode Community Health Initiative cohort from the Geisinger Health System; Sinai, The Mount Sinai BioMe cohort; PMBB, University of Pennsylvania Medicine BioBank; MDCS, Malmo Diet and Cancer Study.

### DESCRIPTION

[0032] Various terms relating to aspects of the present disclosure are used throughout the specification and claims. Such terms are to be given their ordinary meaning in the art, unless otherwise indicated. Other specifically defined terms are to be construed in a manner consistent with the definitions provided herein.

[0033] Unless otherwise expressly stated, it is in no way intended that any method or aspect set forth herein be construed as requiring that its steps be performed in a specific order. Accordingly, where a method claim does not specifically state in the claims or descriptions that the steps are to be limited to a specific order, it is in no way intended that an order be inferred, in any respect. This holds for any possible non-expressed basis for interpretation, including matters of logic with respect to arrangement of steps or operational flow, plain meaning derived from grammatical organization or punctuation, or the number or type of aspects described in the specification.

[0034] As used herein, the singular forms “a,” “an” and “the” include plural referents unless the context clearly dictates otherwise.

[0035] As used herein, the term “about” means that the recited numerical value is approximate and small variations would not significantly affect the practice of the disclosed embodiments. Where a numerical value is used, unless indicated otherwise by the context, the term “about” means the numerical value can vary by ±10% and remain within the scope of the disclosed embodiments.

[0036] As used herein, the term “comprising” may be replaced with “consisting” or “consisting essentially of” in particular embodiments as desired.

[0037] As used herein, the term “isolated”, in regard to a nucleic acid molecule or a polypeptide, means that the nucleic acid molecule or polypeptide is in a condition other than its native environment, such as apart from blood and/or animal tissue. In some embodiments, an isolated nucleic acid molecule or polypeptide is substantially free of other nucleic acid molecules or other polypeptides, particularly other nucleic acid molecules or polypeptides of animal origin. In some embodiments, the nucleic acid molecule or polypeptide can be in a highly purified form, i.e., greater than 95% pure or greater than 99% pure. When used in this context, the term “isolated” does not exclude the presence of the same nucleic acid molecule or polypeptide in alternative physical forms, such as dimers or alternatively phosphorylated or derivatized forms.

[0038] As used herein, the terms “nucleic acid”, “nucleic acid molecule”, “nucleic acid sequence”, “polynucleotide”, or “oligonucleotide” can comprise a polymeric form of nucleotides of any length, can comprise DNA and/or RNA, and can be single-stranded, double-stranded, or multiple stranded. One strand of a nucleic acid also refers to its complement.

[0039] As used herein, the term “subject” includes any animal, including mammals. Mammals include, but are not limited to, farm animals (such as, for example, horse, cow, pig), companion animals (such as, for example, dog, cat), laboratory animals (such as, for example, mouse, rat, rabbits), and non-human primates (such as, for example, apes and monkeys). In some embodiments, the subject is a human. In some embodiments, the subject is a patient under the care of a physician.

[0040] A burden of rare, predicted loss-of-function and/or predicted missense variants in WNT5B associated with a decreased risk of developing decreased bone mineral density in humans has been identified in accordance with the present disclosure. For example, a genetic alteration that changes the cytosine at position 56,698 in the WNT5B reference genomic nucleic acid molecule (see, SEQ ID NO:1) to a thymine, or changes the thymine at position 58,170 in the WNT5B reference genomic nucleic acid molecule (see, SEQ ID NO:1) to an adenine, or changes the cytosine at position 65,099 in the WNT5B reference genomic nucleic acid molecule (see, SEQ ID NO:1) to a thymine, or changes the cytosine at position 65,099 in the WNT5B reference genomic nucleic acid molecule (see, SEQ ID NO:1) to an adenine, or deletes the TC dinucleotide at positions 71,313-71,314 in the WNT5B reference genomic nucleic acid molecule (see, SEQ ID NO:1) has been observed to indicate that the subject having such an alteration may have a decreased risk of developing decreased bone mineral density. It is believed that no nonsynonymous variants of the WNT5B gene or protein have any known association with decreased bone mineral density. Altogether, the genetic analyses described herein indicate that the WNT5B gene associates with decreased risk of developing decreased bone mineral density. Therefore, subjects that are WNT5B reference that have an increased risk of developing decreased bone mineral density, such as osteopenia, Type I osteoporosis, Type II osteoporosis, and secondary osteoporosis, may be treated such that the decreased bone mineral density is prevented, the symptoms thereof are reduced, and/or development of symptoms is repressed. Accordingly, the present disclosure provides methods of leveraging the identification of such variants in subjects to identify or stratify risk in such subjects of developing decreased bone mineral density, such as osteopenia, Type I osteoporosis, Type II osteoporosis, and secondary osteoporosis, or to diagnose subjects as having an increased risk of developing decreased bone mineral density, such as osteopenia, Type I osteoporosis, Type II osteoporosis, and secondary osteoporosis, such that subjects at risk or subjects with active disease may be treated accordingly. Additionally, the present disclosure provides isolated WNT5B variant genomic nucleic acid molecules, variant mRNA molecules, and variant cDNA molecules.

[0041] For purposes of the present disclosure, any particular subject can be categorized as having one of three WNT5B genotypes: i) WNT5B reference; ii) heterozygous for a WNT5B variant nucleic acid molecule encoding a WNT5B predicted loss-of-function polypeptide; or iii) homozygous for a WNT5B variant nucleic acid molecule encoding a WNT5B predicted loss-of-function polypeptide. A subject is WNT5B reference when the subject does not have a copy of a WNT5B variant nucleic acid molecule encoding a WNT5B predicted loss-of-function polypeptide. A subject is heterozygous for a WNT5B variant nucleic acid molecule encoding a WNT5B predicted loss-of-function polypeptide when the subject has a single copy of a WNT5B variant nucleic acid molecule encoding a WNT5B predicted loss-of-function polypeptide. As used herein, a WNT5B variant nucleic acid molecule is any WNT5B nucleic acid molecule (such as, a genomic nucleic acid molecule, an mRNA molecule, or a cDNA molecule) encoding a WNT5B polypeptide having a partial loss-of-function, a complete loss-of-function, a predicted partial loss-of-function, or a predicted complete loss-of-function. A subject who has a WNT5B variant nucleic acid molecule encoding a WNT5B predicted loss-of-function polypeptide having a partial loss-of-function (or predicted partial loss-of-function) is hypomorphic for WNT5B. The WNT5B variant nucleic acid molecule encoding a WNT5B predicted loss-of-function polypeptide can be any nucleic acid molecule encoding a WNT5B Cys83Stop-LG, Cys83Stop-Sht, Cys114Stop, Arg134Cys-LG, Arg134Cys-Sht, Arg134Ser-LG, Arg134Ser-Sht, or Val266fs. A subject is homozygous for a WNT5B variant nucleic acid molecule encoding a WNT5B predicted loss-of-function polypeptide when the subject has two copies of a WNT5B variant nucleic acid molecule encoding a WNT5B predicted loss-of-function polypeptide.

[0042] For subjects that are genotyped or determined to be WNT5B reference, such subjects have an increased risk of developing decreased bone mineral density, such as osteopenia, Type I osteoporosis, Type II osteoporosis, and secondary osteoporosis. For subjects that are genotyped or determined to be either WNT5B reference or heterozygous for a WNT5B variant nucleic acid molecule encoding a WNT5B predicted loss-of-function polypeptide, such subjects can be treated with a WNT5B inhibitor.

[0043] In any of the embodiments described throughout the present disclosure, the WNT5B variant nucleic acid molecule encoding a WNT5B predicted loss-of-function polypeptide can be any WNT5B nucleic acid molecule (such as, for example, genomic nucleic acid molecule, mRNA molecule, or cDNA molecule) encoding a WNT5B polypeptide having a partial loss-of-function, a complete loss-of-function, a predicted partial loss-of-function, or a predicted complete loss-of-function. For example, the WNT5B variant nucleic acid molecule can be any nucleic acid molecule encoding WNT5B Cys83Stop-LG, Cys83Stop-Sht, Cys114Stop, Arg134Cys-LG, Arg134Cys-Sht, Arg134Ser-LG, Arg134Ser-Sht, or Val266fs. In some embodiments, the WNT5B variant nucleic acid molecule encodes WNT5B Cys83Stop-LG. In some embodiments, the WNT5B variant nucleic acid molecule encodes WNT5B Cys83Stop-Sht. In some embodiments, the WNT5B variant nucleic acid molecule encodes WNT5B Cys114Stop. In some embodiments, the WNT5B variant nucleic acid molecule encodes WNT5B Arg134Cys-LG. In some embodiments, the WNT5B variant nucleic acid molecule encodes WNT5B Arg134Cys-Sht. In some embodiments, the WNT5B variant nucleic acid molecule encodes WNT5B Arg134Ser-LG. In some embodiments, the WNT5B variant nucleic acid molecule encodes WNT5B Arg134Ser-Sht. In some embodiments, the WNT5B variant nucleic acid molecule encodes WNT5B Val266fs.

[0044] In any of the embodiments described throughout the present disclosure, the WNT5B predicted loss-of-function polypeptide can be any WNT5B polypeptide having a partial loss-of-function, a complete loss-of-function, a predicted partial loss-of-function, or a predicted complete loss-of-function. In any of the embodiments described throughout the present disclosure, the WNT5B predicted loss-of-function polypeptide can be any of the WNT5B polypeptides described herein including, for example, WNT5B Cys83Stop-LG, Cys83Stop-Sht, Cys114Stop, Arg134Cys-LG, Arg134Cys-Sht, Arg134Ser-LG, Arg134Ser-Sht, or Val266fs. In some embodiments, the WNTB5 predicted loss-of-function polypeptide is Cys83Stop-LG. In some embodiments, the WNTB5 predicted loss-of-function polypeptide is Cys83Stop-Sht. In some embodiments, the WNTB5 predicted loss-of-function polypeptide is Cys114Stop. In some embodiments, the WNTB5 predicted loss-of-function polypeptide is Arg134Cys-LG. In some embodiments, the WNTB5 predicted loss-of-function polypeptide is Arg134Cys-Sht. In some embodiments, the WNTB5 predicted loss-of-function polypeptide is Arg134Ser-LG. In some embodiments, the WNTB5 predicted loss-of-function polypeptide is Arg134Ser-Sht. In some embodiments, the WNTB5 predicted loss-of-function polypeptide is Val266fs.

[0045] In any of the embodiments described throughout the present disclosure, the decreased bone mineral density is osteopenia, Type I osteoporosis, Type II osteoporosis, and secondary osteoporosis. In any of the embodiments described throughout the present disclosure, the decreased bone mineral density is osteopenia. In any of the embodiments described throughout the present disclosure, the decreased bone mineral density is Type I osteoporosis. In any of the embodiments described throughout the present disclosure, the decreased bone mineral density is Type II osteoporosis. In any of the embodiments described throughout the present disclosure, the decreased bone mineral density is secondary osteoporosis.

[0046] Symptoms of decreased bone mineral density include, but are not limited to, increased bone fragility (manifesting as bone fracture as a result of a mild to moderate trauma), reduced bone density, localized bone pain and weakness in an area of a broken bone, loss of height or change in posture, such as stooping over, high levels of serum calcium or alkaline phosphatase on a blood test, vitamin D deficiency, and joint or muscle aches, or any combination thereof.

[0047] The present disclosure provides methods of treating a subject having decreased bone mineral density or at risk of developing decreased bone mineral density, the methods comprising administering a WNT5B inhibitor to the subject.

[0048] The present disclosure also provides methods of treating a subject having osteopenia or at risk of developing osteopenia, the methods comprising administering a WNT5B inhibitor to the subject.

[0049] The present disclosure also provides methods of treating a subject having Type I osteoporosis or at risk of developing Type I osteoporosis, the methods comprising administering a WNT5B inhibitor to the subject.

[0050] The present disclosure also provides methods of treating a subject having Type II osteoporosis or at risk of developing Type II osteoporosis, the methods comprising administering a WNT5B inhibitor to the subject.

[0051] The present disclosure also provides methods of treating a subject having secondary osteoporosis or at risk of developing secondary osteoporosis, the methods comprising administering a WNT5B inhibitor to the subject.

[0052] In some embodiments, the WNT5B inhibitor comprises an inhibitory nucleic acid molecule. In some embodiments, the inhibitory nucleic acid molecule comprises an antisense molecule, a small interfering RNA (siRNA) molecule, or a short hairpin RNA (shRNA) molecule. In some embodiments, the inhibitory nucleic acid molecule comprises an antisense molecule. In some embodiments, the inhibitory nucleic acid molecule comprises an siRNA molecule. In some embodiments, the inhibitory nucleic acid molecule comprises an shRNA molecule. Such inhibitory nucleic acid molecules can be designed to target any region of a WNT5B nucleic acid molecule, such as an mRNA molecule. In some embodiments, the inhibitory nucleic acid molecule hybridizes to a sequence within a WNT5B genomic nucleic acid molecule or mRNA molecule and decreases expression of the WNT5B polypeptide in a cell in the subject. In some embodiments, the WNT5B inhibitor comprises an antisense molecule that hybridizes to a WNT5B genomic nucleic acid molecule or mRNA molecule and decreases expression of the WNT5B polypeptide in a cell in the subject. In some embodiments, the WNT5B inhibitor comprises an siRNA that hybridizes to a WNT5B genomic nucleic acid molecule or mRNA molecule and decreases expression of the WNT5B polypeptide in a cell in the subject. In some embodiments, the WNT5B inhibitor comprises an shRNA that hybridizes to a WNT5B genomic nucleic acid molecule or mRNA molecule and decreases expression of the WNT5B polypeptide in a cell in the subject.

[0053] The inhibitory nucleic acid molecules can comprise RNA, DNA, or both RNA and DNA. The inhibitory nucleic acid molecules can also be linked or fused to a heterologous nucleic acid sequence, such as in a vector, or a heterologous label. For example, the inhibitory nucleic acid molecules can be within a vector or as an exogenous donor sequence comprising the inhibitory nucleic acid molecule and a heterologous nucleic acid sequence. The inhibitory nucleic acid molecules can also be linked or fused to a heterologous label. The label can be directly detectable (such as, for example, fluorophore) or indirectly detectable (such as, for example, hapten, enzyme, or fluorophore quencher). Such labels can be detectable by spectroscopic, photochemical, biochemical, immunochemical, or chemical means. Such labels include, for example, radiolabels, pigments, dyes, chromogens, spin labels, and fluorescent labels. The label can also be, for example, a chemiluminescent substance; a metal-containing substance; or an enzyme, where there occurs an enzyme-dependent secondary generation of signal. The term “label” can also refer to a “tag” or hapten that can bind selectively to a conjugated molecule such that the conjugated molecule, when added subsequently along with a substrate, is used to generate a detectable signal. For example, biotin can be used as a tag along with an avidin or streptavidin conjugate of horseradish peroxidate (HRP) to bind to the tag, and examined using a calorimetric substrate (such as, for example, tetramethylbenzidine (TMB)) or a fluorogenic substrate to detect the presence of HRP. Exemplary labels that can be used as tags to facilitate purification include, but are not limited to, myc, HA, FLAG or 3×FLAG, 6×His or polyhistidine, glutathione-S-transferase (GST), maltose binding protein, an epitope tag, or the Fc portion of immunoglobulin. Numerous labels include, for example, particles, fluorophores, haptens, enzymes and their calorimetric, fluorogenic and chemiluminescent substrates and other labels.

[0054] The inhibitory nucleic acid molecules can comprise, for example, nucleotides or non-natural or modified nucleotides, such as nucleotide analogs or nucleotide substitutes. Such nucleotides include a nucleotide that contains a modified base, sugar, or phosphate group, or that incorporates a non-natural moiety in its structure. Examples of non-natural nucleotides include, but are not limited to, dideoxynucleotides, biotinylated, aminated, deaminated, alkylated, benzylated, and fluorophor-labeled nucleotides.

[0055] The inhibitory nucleic acid molecules can also comprise one or more nucleotide analogs or substitutions. A nucleotide analog is a nucleotide which contains a modification to either the base, sugar, or phosphate moieties. Modifications to the base moiety include, but are not limited to, natural and synthetic modifications of A, C, G, and T/U, as well as different purine or pyrimidine bases such as, for example, pseudouridine, uracil-5-yl, hypoxanthin-9-yl (I), and 2-aminoadenin-9-yl. Modified bases include, but are not limited to, 5-methylcytosine (5-me-C), 5-hydroxymethyl cytosine, xanthine, hypoxanthine, 2-aminoadenine, 6-methyl and other alkyl derivatives of adenine and guanine, 2-propyl and other alkyl derivatives of adenine and guanine, 2-thiouracil, 2-thiothymine and 2-thiocytosine, 5-halouracil and cytosine, 5-propynyl uracil and cytosine, 6-azo uracil, cytosine and thymine, 5-uracil (pseudouracil), 4-thiouracil, 8-halo, 8-amino, 8-thiol, 8-thioalkyl, 8-hydroxyl and other 8-substituted adenines and guanines, 5-halo (such as, for example, 5-bromo), 5-trifluoromethyl and other 5-substituted uracils and cytosines, 7-methylguanine, 7-methyladenine, 8-azaguanine, 8-azaadenine, 7-deazaguanine, 7-deazaadenine, 3-deazaguanine, and 3-deazaadenine.

[0056] Nucleotide analogs can also include modifications of the sugar moiety. Modifications to the sugar moiety include, but are not limited to, natural modifications of the ribose and deoxy ribose as well as synthetic modifications. Sugar modifications include, but are not limited to, the following modifications at the 2′ position: OH; F; O-, S-, or N-alkyl; O-, S-, or N-alkenyl; O-, S- or N-alkynyl; or O-alkyl-O-alkyl, wherein the alkyl, alkenyl, and alkynyl may be substituted or unsubstituted C₁₋₁₀alkyl or C₂₋₁₀alkenyl, and C₂₋₁₀alkynyl. Exemplary 2′ sugar modifications also include, but are not limited to, —O[(CH₂)ₙO]ₘCH₃, —O(CH₂)ₙOCH₃, —O(CH₂)ₙNH₂, —O(CH₂)ₙCH₃, —O(CH₂)ₙ—ONH₂, and —O(CH₂)ₙON[(CH₂)ₙCH₃)]₂, where n and m, independently, are from 1 to about 10. Other modifications at the 2′ position include, but are not limited to, C₁₋₁₀alkyl, substituted lower alkyl, alkaryl, aralkyl, O-alkaryl or O-aralkyl, SH, SCH₃, OCN, Cl, Br, CN, CF₃, OCF₃, SOCH₃, SO₂CH₃, ONO₂, NO₂, N₃, NH₂, heterocycloalkyl, heterocycloalkaryl, aminoalkylamino, polyalkylamino, substituted silyl, an RNA cleaving group, a reporter group, an intercalator, a group for improving the pharmacokinetic properties of an oligonucleotide, or a group for improving the pharmacodynamic properties of an oligonucleotide, and other substituents having similar properties. Similar modifications may also be made at other positions on the sugar, particularly the 3′ position of the sugar on the 3′ terminal nucleotide or in 2′-5′ linked oligonucleotides and the 5′ position of 5′ terminal nucleotide. Modified sugars can also include those that contain modifications at the bridging ring oxygen, such as CH₂ and S. Nucleotide sugar analogs can also have sugar mimetics, such as cyclobutyl moieties in place of the pentofuranosyl sugar.

[0057] Nucleotide analogs can also be modified at the phosphate moiety. Modified phosphate moieties include, but are not limited to, those that can be modified so that the linkage between two nucleotides contains a phosphorothioate, chiral phosphorothioate, phosphorodithioate, phosphotriester, aminoalkylphosphotriester, methyl and other alkyl phosphonates including 3′-alkylene phosphonate and chiral phosphonates, phosphinates, phosphoramidates including 3′-amino phosphoramidate and aminoalkylphosphoramidates, thionophosphoramidates, thionoalkylphosphonates, thionoalkylphosphotriesters, and boranophosphates. These phosphate or modified phosphate linkage between two nucleotides can be through a 3′-5′ linkage or a 2′-5′ linkage, and the linkage can contain inverted polarity such as 3′-5′ to 5′-3′ or 2′-5′ to 5′-2′. Various salts, mixed salts, and free acid forms are also included. Nucleotide substitutes also include peptide nucleic acids (PNAs).

[0058] In some embodiments, the antisense nucleic acid molecules are gapmers, whereby the first one to seven nucleotides at the 5′ and 3′ ends each have 2′-methoxyethyl (2′-MOE) modifications. In some embodiments, the first five nucleotides at the 5′ and 3′ ends each have 2′-MOE modifications. In some embodiments, the first one to seven nucleotides at the 5′ and 3′ ends are RNA nucleotides. In some embodiments, the first five nucleotides at the 5′ and 3′ ends are RNA nucleotides. In some embodiments, each of the backbone linkages between the nucleotides is a phosphorothioate linkage.

[0059] In some embodiments, the siRNA molecules have termini modifications. In some embodiments, the 5′ end of the antisense strand is phosphorylated. In some embodiments, 5′-phosphate analogs that cannot be hydrolyzed, such as 5′-(E)-vinyl-phosphonate are used.

[0060] In some embodiments, the siRNA molecules have backbone modifications. In some embodiments, the modified phosphodiester groups that link consecutive ribose nucleosides have been shown to enhance the stability and in vivo bioavailability of siRNAs The non-ester groups (—OH, ═O) of the phosphodiester linkage can be replaced with sulfur, boron, or acetate to give phosphorothioate, boranophosphate, and phosphonoacetate linkages. In addition, substituting the phosphodiester group with a phosphotriester can facilitate cellular uptake of siRNAs and retention on serum components by eliminating their negative charge. In some embodiments, the siRNA molecules have sugar modifications. In some embodiments, the sugars are deprotonated (reaction catalyzed by exo- and endonucleases) whereby the 2′-hydroxyl can act as a nucleophile and attack the adjacent phosphorous in the phosphodiester bond. Such alternatives include 2′-O-methyl, 2′-O-methoxyethyl, and 2′-fluoro modifications.

[0061] In some embodiments, the siRNA molecules have base modifications. In some embodiments, the bases can be substituted with modified bases such as pseudouridine, 5′-methylcytidine, N6-methyladenosine, inosine, and N7-methylguanosine.

[0062] In some embodiments, the siRNA molecules are conjugated to lipids. Lipids can be conjugated to the 5′ or 3′ termini of siRNA to improve their in vivo bioavailability by allowing them to associate with serum lipoproteins. Representative lipids include, but are not limited to, cholesterol and vitamin E, and fatty acids, such as palmitate and tocopherol.

[0063] In some embodiments, a representative siRNA has the following formula:

Sense: mN*mN*/i2FN/mN/i2FN/mN/i2FN/mN/i2FN/mN/i2FN/mN/i2FN/mN/i2FN/mN/i2FN/*mN*/32FN/

### Antisense: /52FN/*/i2FN/*mN/i2FN/mN/i2FN/mN/i2FN/mN/i2FN/mN/i2FN/mN/i2FN/mN/i2FN/mN/i2FN/mN*N*N

[0064] wherein: “N” is the base; “2F” is a 2′-F modification; “m” is a 2′-O-methyl modification, “i” is an internal base; and “*” is a phosphorothioate backbone linkage.

[0065] The present disclosure also provides vectors comprising any one or more of the inhibitory nucleic acid molecules. In some embodiments, the vectors comprise any one or more of the inhibitory nucleic acid molecules and a heterologous nucleic acid. The vectors can be viral or nonviral vectors capable of transporting a nucleic acid molecule. In some embodiments, the vector is a plasmid or cosmid (such as, for example, a circular double-stranded DNA into which additional DNA segments can be ligated). In some embodiments, the vector is a viral vector, wherein additional DNA segments can be ligated into the viral genome. Expression vectors include, but are not limited to, plasmids, cosmids, retroviruses, adenoviruses, adeno-associated viruses (AAV), plant viruses such as cauliflower mosaic virus and tobacco mosaic virus, yeast artificial chromosomes (YACs), Epstein-Barr (EBV)-derived episomes, and other expression vectors known in the art.

[0066] The present disclosure also provides compositions comprising any one or more of the inhibitory nucleic acid molecules. In some embodiments, the composition is a pharmaceutical composition. In some embodiments, the compositions comprise a carrier and/or excipient. Examples of carriers include, but are not limited to, poly(lactic acid) (PLA) microspheres, poly(D,L-lactic-coglycolic-acid) (PLGA) microspheres, liposomes, micelles, inverse micelles, lipid cochleates, and lipid microtubules. A carrier may comprise a buffered salt solution such as PBS, HBSS, etc.

[0067] In some embodiments, the WNT5B inhibitor comprises a nuclease agent that induces one or more nicks or double-strand breaks at a recognition sequence(s) or a DNA-binding protein that binds to a recognition sequence within a WNT5B genomic nucleic acid molecule. The recognition sequence can be located within a coding region of the WNT5B gene, or within regulatory regions that influence the expression of the gene. A recognition sequence of the DNA-binding protein or nuclease agent can be located in an intron, an exon, a promoter, an enhancer, a regulatory region, or any non-protein coding region. The recognition sequence can include or be proximate to the start codon of the WNT5B gene. For example, the recognition sequence can be located about 10, about 20, about 30, about 40, about 50, about 100, about 200, about 300, about 400, about 500, or about 1,000 nucleotides from the start codon. As another example, two or more nuclease agents can be used, each targeting a nuclease recognition sequence including or proximate to the start codon. As another example, two nuclease agents can be used, one targeting a nuclease recognition sequence including or proximate to the start codon, and one targeting a nuclease recognition sequence including or proximate to the stop codon, wherein cleavage by the nuclease agents can result in deletion of the coding region between the two nuclease recognition sequences. Any nuclease agent that induces a nick or double-strand break into a desired recognition sequence can be used in the methods and compositions disclosed herein. Any DNA-binding protein that binds to a desired recognition sequence can be used in the methods and compositions disclosed herein.

[0068] Suitable nuclease agents and DNA-binding proteins for use herein include, but are not limited to, zinc finger protein or zinc finger nuclease (ZFN) pair, Transcription Activator-Like Effector (TALE) protein or Transcription Activator-Like Effector Nuclease (TALEN), or Clustered Regularly Interspersed Short Palindromic Repeats (CRISPR)/CRISPR-associated (Cas) systems. The length of the recognition sequence can vary, and includes, for example, recognition sequences that are about 30-36 bp for a zinc finger protein or ZFN pair, about 15-18 bp for each ZFN, about 36 bp for a TALE protein or TALEN, and about 20 bp for a CRISPR/Cas guide RNA.

[0069] In some embodiments, CRISPR/Cas systems can be used to modify a WNT5B genomic nucleic acid molecule within a cell. The methods and compositions disclosed herein can employ CRISPR-Cas systems by utilizing CRISPR complexes (comprising a guide RNA (gRNA) complexed with a Cas protein) for site-directed cleavage of WNT5B nucleic acid molecules.

[0070] Cas proteins generally comprise at least one RNA recognition or binding domain that can interact with gRNAs. Cas proteins can also comprise nuclease domains (such as, for example, DNase or RNase domains), DNA binding domains, helicase domains, protein-protein interaction domains, dimerization domains, and other domains. Suitable Cas proteins include, for example, a wild type Cas9 protein and a wild type Cpf1 protein (such as, for example, FnCpf1). A Cas protein can have full cleavage activity to create a double-strand break in a WNT5B genomic nucleic acid molecule or it can be a nickase that creates a single-strand break in a WNT5B genomic nucleic acid molecule. Additional examples of Cas proteins include, but are not limited to, Cas1, Cas1B, Cast, Cas3, Cas4, Cas5, Cas5e (CasD), Cas6, Cas6e, Cas6f, Cas7, Cas8a1, Cas8a2, Cas8b, Cas8c, Cas9 (Csn1 or Csx12), Cas10, Cas10d, CasF, CasG, CasH, Csy1, Csy2, Csy3, Cse1 (CasA), Cse2 (CasB), Cse3 (CasE), Cse4 (CasC), Csc1, Csc2, Csa5, Csn2, Csm2, Csm3, Csm4, Csm5, Csm6, Cmr1, Cmr3, Cmr4, Cmr5, Cmr6, Csb1, Csb2, Csb3, Csx17, Csx14, Csx10, Csx16, CsaX, Csx3, Csx1, Csx15, Csf1, Csf2, Csf3, Csf4, and Cu1966, and homologs or modified versions thereof. Cas proteins can also be operably linked to heterologous polypeptides as fusion proteins. For example, a Cas protein can be fused to a cleavage domain, an epigenetic modification domain, a transcriptional activation domain, or a transcriptional repressor domain. Cas proteins can be provided in any form. For example, a Cas protein can be provided in the form of a protein, such as a Cas protein complexed with a gRNA. Alternately, a Cas protein can be provided in the form of a nucleic acid molecule encoding the Cas protein, such as an RNA or DNA.

[0071] In some embodiments, targeted genetic modifications of a WNT5B genomic nucleic acid molecules can be generated by contacting a cell with a Cas protein and one or more gRNAs that hybridize to one or more gRNA recognition sequences within a target genomic locus in the WNT5B genomic nucleic acid molecule. For example, a gRNA recognition sequence can be located within a region of SEQ ID NO:1. The gRNA recognition sequence can also include or be proximate to a position corresponding to: position 56,698, position 58,170, position 65,099, position 65,099, or positions 71,313-71,314 according to SEQ ID NO:1. For example, the gRNA recognition sequence can be located from about 1000, from about 500, from about 400, from about 300, from about 200, from about 100, from about 50, from about 45, from about 40, from about 35, from about 30, from about 25, from about 20, from about 15, from about 10, or from about 5 nucleotides of a position corresponding to: position 56,698, position 58,170, position 65,099, position 65,099, or positions 71,313-71,314 according to SEQ ID NO:1. The gRNA recognition sequence can include or be proximate to the start codon of a WNT5B genomic nucleic acid molecule or the stop codon of a WNT5B genomic nucleic acid molecule. For example, the gRNA recognition sequence can be located from about 10, from about 20, from about 30, from about 40, from about 50, from about 100, from about 200, from about 300, from about 400, from about 500, or from about 1,000 nucleotides of the start codon or the stop codon.

[0072] The gRNA recognition sequences within a target genomic locus in a WNT5B genomic nucleic acid molecule are located near a Protospacer Adjacent Motif (PAM) sequence, which is a 2-6 base pair DNA sequence immediately following the DNA sequence targeted by the Cas9 nuclease. The canonical PAM is the sequence 5′-NGG-3′ where “N” is any nucleobase followed by two guanine (“G”) nucleobases. gRNAs can transport Cas9 to anywhere in the genome for gene editing, but no editing can occur at any site other than one at which Cas9 recognizes PAM. In addition, 5′-NGA-3′ can be a highly efficient non-canonical PAM for human cells. Generally, the PAM is about 2 to about 6 nucleotides downstream of the DNA sequence targeted by the gRNA. The PAM can flank the gRNA recognition sequence. In some embodiments, the gRNA recognition sequence can be flanked on the 3′ end by the PAM. In some embodiments, the gRNA recognition sequence can be flanked on the 5′ end by the PAM. For example, the cleavage site of Cas proteins can be about 1 to about 10 base pairs, about 2 to about 5 base pairs, or 3 base pairs upstream or downstream of the PAM sequence. In some embodiments (such as when Cas9 from S. pyogenes or a closely related Cas9 is used), the PAM sequence of the non-complementary strand can be 5′-NGG-3′, where N is any DNA nucleotide and is immediately 3′ of the gRNA recognition sequence of the non-complementary strand of the target DNA. As such, the PAM sequence of the complementary strand would be 5′-CCN-3′, where N is any DNA nucleotide and is immediately 5′ of the gRNA recognition sequence of the complementary strand of the target DNA.

[0073] A gRNA is an RNA molecule that binds to a Cas protein and targets the Cas protein to a specific location within a WNT5B genomic nucleic acid molecule. An exemplary gRNA is a gRNA effective to direct a Cas enzyme to bind to or cleave a WNT5B genomic nucleic acid molecule, wherein the gRNA comprises a DNA-targeting segment that hybridizes to a gRNA recognition sequence within the WNT5B genomic nucleic acid molecule that includes or is proximate to a position corresponding to: position 56,698, position 58,170, position 65,099, position 65,099, or positions 71,313-71,314 according to SEQ ID NO:1. For example, a gRNA can be selected such that it hybridizes to a gRNA recognition sequence that is located about 5, about 10, about 15, about 20, about 25, about 30, about 35, about 40, about 45, about 50, about 100, about 200, about 300, about 400, about 500, or about 1,000 nucleotides from a position corresponding to: position 56,698, position 58,170, position 65,099, position 65,099, or positions 71,313-71,314 according to SEQ ID NO:1. Other exemplary gRNAs comprise a DNA-targeting segment that hybridizes to a gRNA recognition sequence present within a WNT5B genomic nucleic acid molecule that includes or is proximate to the start codon or the stop codon. For example, a gRNA can be selected such that it hybridizes to a gRNA recognition sequence that is located about 5, about 10, about 15, about 20, about 25, about 30, about 35, about 40, about 45, about 50, about 100, about 200, about 300, about 400, about 500, or about 1,000 nucleotides of the start codon or located about 5, about 10, about 15, about 20, about 25, about 30, about 35, about 40, about 45, about 50, about 100, about 200, about 300, about 400, about 500, or about 1,000 nucleotides of the stop codon. Suitable gRNAs can comprise from about 17 to about 25 nucleotides, from about 17 to about 23 nucleotides, from about 18 to about 22 nucleotides, or from about 19 to about 21 nucleotides. In some embodiments, the gRNAs can comprise 20 nucleotides.

[0074] Examples of suitable gRNA recognition sequences located within the WNT5B reference gene are set forth in Table 1 as SEQ ID NOs:104-123.

TABLE 1
Guide RNA Recognition Sequences
Near WNT5B Variation(s)

| Strand | gRNA Recognition Sequence | SEQ ID NO: |
|---|---|---|
| + | AAGAAGTGCACGGAGATCGTG | 104 |
| + | AAGCTTGAGCTGCTGCTGTCA | 105 |
| + | AAGGAATGCCAGCACCAGTTC | 106 |
| + | AAGTTCCACTGGTGCTGCTTC | 107 |
| + | AAGTGCACGGAGATCGTGGAC | 108 |
| + | AAGCTGTGCCAATTGTACCAG | 109 |
| + | AAGACTGGCATCAAGGAATGC | 110 |
| + | AAGAGACGCTGGAGATCTCTG | 111 |
| + | AAGGAGAAGTACGACAGCGCG | 112 |
| + | AAGTCTAGAGTCTTTGTTGGT | 113 |
| + | GTGCAGAGACCCGAGATGTTT | 114 |
| + | GAAGCTGTGCCAATTGTACCA | 115 |
| + | GTGCTGCTTCGTCAGGTGTAA | 116 |
| + | GCTGCGTGGACGTTATACTGT | 117 |
| + | ACCCTACTCTGGAAACTGT | 118 |
| + | AGAGGAAGCTGTGCCAATT | 119 |
| + | GGAGGAGATGATCTTGTCT | 120 |
| + | GCTTCAACCTCGATGTCTT | 121 |
| + | GCGAGAATTCTTCATCCTC | 122 |
| + | GAGAGAAGAACTTTGCCAA | 123 |

[0075] The Cas protein and the gRNA form a complex, and the Cas protein cleaves the target WNT5B genomic nucleic acid molecule. The Cas protein can cleave the nucleic acid molecule at a site within or outside of the nucleic acid sequence present in the target WNT5B genomic nucleic acid molecule to which the DNA-targeting segment of a gRNA will bind. For example, formation of a CRISPR complex (comprising a gRNA hybridized to a gRNA recognition sequence and complexed with a Cas protein) can result in cleavage of one or both strands in or near (such as, for example, within 1, 2, 3, 4, 5, 6, 7, 8, 9, 10, 20, 50, or more base pairs from) the nucleic acid sequence present in the WNT5B genomic nucleic acid molecule to which a DNA-targeting segment of a gRNA will bind.

[0076] Such methods can result, for example, in a WNT5B genomic nucleic acid molecule in which a region of SEQ ID NO:1 is disrupted, the start codon is disrupted, the stop codon is disrupted, or the coding sequence is disrupted or deleted. Optionally, the cell can be further contacted with one or more additional gRNAs that hybridize to additional gRNA recognition sequences within the target genomic locus in the WNT5B genomic nucleic acid molecule. By contacting the cell with one or more additional gRNAs (such as, for example, a second gRNA that hybridizes to a second gRNA recognition sequence), cleavage by the Cas protein can create two or more double-strand breaks or two or more single-strand breaks.

[0077] In some embodiments, the WNT5B inhibitor comprises a small molecule. In some embodiments, the WNT5B inhibitor is KY02111.

[0078] In some embodiments, the methods of treatment further comprise detecting the presence or absence of a WNT5B variant nucleic acid molecule encoding a WNT5B predicted loss-of-function polypeptide in a biological sample obtained from the subject. As used throughout the present disclosure, “a WNT5B variant nucleic acid molecule” is any WNT5B nucleic acid molecule (such as, for example, genomic nucleic acid molecule, mRNA molecule, or cDNA molecule) encoding a WNT5B polypeptide having a partial loss-of-function, a complete loss-of-function, a predicted partial loss-of-function, or a predicted complete loss-of-function.

[0079] The present disclosure also provides methods of treating a subject with a therapeutic agent that treats or prevents decreased bone mineral density. In some embodiments, the subject has decreased bone mineral density or is at risk of developing decreased bone mineral density. In some embodiments, the subject has decreased bone mineral density. In some embodiments, the subject is at risk of developing decreased bone mineral density. In some embodiments, the methods comprise determining whether the subject has a WNT5B variant nucleic acid molecule encoding a WNT5B predicted loss-of-function polypeptide by obtaining or having obtained a biological sample from the subject, and performing or having performed a sequence analysis on the biological sample to determine if the subject has a genotype comprising the WNT5B variant nucleic acid molecule. When the subject is WNT5B reference, the therapeutic agent that treats or prevents decreased bone mineral density is administered or continued to be administered to the subject in a standard dosage amount, and/or a WNT5B inhibitor is administered to the subject. When the subject is heterozygous for a WNT5B variant nucleic acid molecule, the therapeutic agent that treats or prevents decreased bone mineral density is administered or continued to be administered to the subject in an amount that is the same as or less than a standard dosage amount, and/or a WNT5B inhibitor is administered to the subject. The presence of a genotype having the WNT5B variant nucleic acid molecule encoding a WNT5B predicted loss-of-function polypeptide indicates the subject has a decreased risk of developing decreased bone mineral density. In some embodiments, the subject is WNT5B reference. In some embodiments, the subject is heterozygous for the WNT5B variant nucleic acid molecule encoding a WNT5B predicted loss-of-function polypeptide.

[0080] For subjects that are genotyped or determined to be either WNT5B reference or heterozygous for the WNT5B variant nucleic acid molecule encoding a WNT5B predicted loss-of-function polypeptide, such subjects can be treated with a WNT5B inhibitor, as described herein.

[0081] Detecting the presence or absence of a WNT5B variant nucleic acid molecule encoding a WNT5B predicted loss-of-function polypeptide in a biological sample from a subject and/or determining whether a subject has a WNT5B variant nucleic acid molecule encoding a WNT5B predicted loss-of-function polypeptide can be carried out by any of the methods described herein. In some embodiments, these methods can be carried out in vitro. In some embodiments, these methods can be carried out in situ. In some embodiments, these methods can be carried out in vivo. In any of these embodiments, the WNT5B variant nucleic acid molecule encoding a WNT5B predicted loss-of-function polypeptide can be present within a cell obtained from the subject.

[0082] In some embodiments, when the subject is WNT5B reference, the subject is administered a therapeutic agent that treats or prevents decreased bone mineral density in a standard dosage amount. In some embodiments, when the subject is heterozygous for a WNT5B variant nucleic acid molecule encoding a WNT5B predicted loss-of-function polypeptide, the subject is administered a therapeutic agent that treats or prevents decreased bone mineral density in a dosage amount that is the same as or less than a standard dosage amount.

[0083] In some embodiments, the treatment methods further comprise detecting the presence or absence of a WNT5B predicted loss-of-function polypeptide in a biological sample from the subject. In some embodiments, when the subject does not have a WNT5B predicted loss-of-function polypeptide, the subject is administered a therapeutic agent that treats or prevents decreased bone mineral density in a standard dosage amount. In some embodiments, when the subject has a WNT5B predicted loss-of-function polypeptide, the subject is administered a therapeutic agent that treats or prevents decreased bone mineral density in a dosage amount that is the same as or less than a standard dosage amount.

[0084] The present disclosure also provides methods of treating a subject with a therapeutic agent that treats or prevents decreased bone mineral density. In some embodiments, the subject has decreased bone mineral density or is at risk of developing decreased bone mineral density. In some embodiments, the subject has decreased bone mineral density. In some embodiments, the subject is at risk of developing decreased bone mineral density. In some embodiments, the method comprises determining whether the subject has a WNT5B predicted loss-of-function polypeptide by obtaining or having obtained a biological sample from the subject, and performing or having performed an assay on the biological sample to determine if the subject has a WNT5B predicted loss-of-function polypeptide. When the subject does not have a WNT5B predicted loss-of-function polypeptide, the therapeutic agent that treats or prevents decreased bone mineral density is administered or continued to be administered to the subject in a standard dosage amount, and/or a WNT5B inhibitor is administered to the subject. When the subject has a WNT5B predicted loss-of-function polypeptide, the therapeutic agent that treats or prevents decreased bone mineral density is administered or continued to be administered to the subject in an amount that is the same as or less than a standard dosage amount, and/or a WNT5B inhibitor is administered to the subject. The presence of a WNT5B predicted loss-of-function polypeptide indicates the subject has a decreased risk of developing decreased bone mineral density. In some embodiments, the subject has a WNT5B predicted loss-of-function polypeptide. In some embodiments, the subject does not have a WNT5B predicted loss-of-function polypeptide.

[0085] Detecting the presence or absence of a WNT5B predicted loss-of-function polypeptide in a biological sample from a subject and/or determining whether a subject has a WNT5B predicted loss-of-function polypeptide can be carried out by any of the methods described herein. In some embodiments, these methods can be carried out in vitro. In some embodiments, these methods can be carried out in situ. In some embodiments, these methods can be carried out in vivo. In any of these embodiments, the WNT5B predicted loss-of-function polypeptide can be present within a cell obtained from the subject.

[0086] Examples of therapeutic agents that treat or prevent decreased bone mineral density include, but are not limited to: calcium and vitamin D supplementation (vitamin D2, vitamin D3, and cholecalciferol), bisphosphonate medications, such as FOSAMAX®, (alendronate), BONIVA® (ibandronate), RECLAST® (zoledronate), ACTONEL® (risedronate), MIACALCIN®, FORTICAL®, and CALCIMAR® (calcitonin), FORTEO® (teriparatide), PROLIA® (denosumab), hormone replacement therapy with estrogen and progesterone as well as EVISTA® (raloxifene). In some embodiments, the therapeutic agent that treats or prevents decreased bone mineral density is vitamin D2, vitamin D3, cholecalciferol, alendronate, ibandronate, zoledronate, risedronate, calcitonin, teriparatide, denosumab, or raloxifene. In some embodiments, the therapeutic agent that treats or prevents decreased bone mineral density is vitamin D2. In some embodiments, the therapeutic agent that treats or prevents decreased bone mineral density is vitamin D3. In some embodiments, the therapeutic agent that treats or prevents decreased bone mineral density is cholecalciferol. In some embodiments, the therapeutic agent that treats or prevents decreased bone mineral density is alendronate. In some embodiments, the therapeutic agent that treats or prevents decreased bone mineral density is ibandronate. In some embodiments, the therapeutic agent that treats or prevents decreased bone mineral density is zoledronate. In some embodiments, the therapeutic agent that treats or prevents decreased bone mineral density is risedronate. In some embodiments, the therapeutic agent that treats or prevents decreased bone mineral density is calcitonin. In some embodiments, the therapeutic agent that treats or prevents decreased bone mineral density is teriparatide. In some embodiments, the therapeutic agent that treats or prevents decreased bone mineral density is denosumab. In some embodiments, the therapeutic agent that treats or prevents decreased bone mineral density is raloxifene.

[0087] In some embodiments, the dose of the therapeutic agents that treat or prevents decreased bone mineral density can be reduced by about 10%, by about 20%, by about 30%, by about 40%, by about 50%, by about 60%, by about 70%, by about 80%, or by about 90% for subjects that are heterozygous for a WNT5B variant nucleic acid molecule encoding a WNT5B predicted loss-of-function polypeptide (i.e., a less than the standard dosage amount) compared to subjects that are WNT5B reference (who may receive a standard dosage amount). In some embodiments, the dose of the therapeutic agents that treat or prevent decreased bone mineral density can be reduced by about 10%, by about 20%, by about 30%, by about 40%, or by about 50%. In addition, the dose of therapeutic agents that treat or prevent decreased bone mineral density in subjects that are heterozygous for a WNT5B variant nucleic acid molecule encoding a WNT5B predicted loss-of-function polypeptide can be administered less frequently compared to subjects that are WNT5B reference.

[0088] Administration of the therapeutic agents that treat or prevents decreased bone mineral density and/or WNT5B inhibitors can be repeated, for example, after one day, two days, three days, five days, one week, two weeks, three weeks, one month, five weeks, six weeks, seven weeks, eight weeks, two months, or three months. The repeated administration can be at the same dose or at a different dose. The administration can be repeated once, twice, three times, four times, five times, six times, seven times, eight times, nine times, ten times, or more. For example, according to certain dosage regimens a subject can receive therapy for a prolonged period of time such as, for example, 6 months, 1 year, or more. In addition, the therapeutic agents that treat or prevent decreased bone mineral density and/or WNT5B inhibitors can be administered sequentially or at the same time. In addition, the therapeutic agents that treat or prevent decreased bone mineral density and/or WNT5B inhibitors can be administered in separate compositions or can be administered together in the same composition.

[0089] Administration of the therapeutic agents that treat or prevent decreased bone mineral density and/or WNT5B inhibitors can occur by any suitable route including, but not limited to, parenteral, intravenous, oral, subcutaneous, intra-arterial, intracranial, intrathecal, intraperitoneal, topical, intranasal, or intramuscular. Pharmaceutical compositions for administration are desirably sterile and substantially isotonic and manufactured under GMP conditions. Pharmaceutical compositions can be provided in unit dosage form (i.e., the dosage for a single administration). Pharmaceutical compositions can be formulated using one or more physiologically and pharmaceutically acceptable carriers, diluents, excipients or auxiliaries. The formulation depends on the route of administration chosen. The term “pharmaceutically acceptable” means that the carrier, diluent, excipient, or auxiliary is compatible with the other ingredients of the formulation and not substantially deleterious to the recipient thereof.

[0090] The terms “treat”, “treating”, and “treatment” and “prevent”, “preventing”, and “prevention” as used herein, refer to eliciting the desired biological response, such as a therapeutic and prophylactic effect, respectively. In some embodiments, a therapeutic effect comprises one or more of a decrease/reduction in decreased bone mineral density, a decrease/reduction in the severity of decreased bone mineral density (such as, for example, a reduction or inhibition of development of decreased bone mineral density), a decrease/reduction in symptoms and decreased bone mineral density-related effects, delaying the onset of symptoms and decreased bone mineral density-related effects, reducing the severity of symptoms of decreased bone mineral density-related effects, reducing the severity of an acute episode, reducing the number of symptoms and decreased bone mineral density-related effects, reducing the latency of symptoms and decreased bone mineral density-related effects, an amelioration of symptoms and decreased bone mineral density-related effects, reducing secondary symptoms, reducing secondary infections, preventing relapse to decreased bone mineral density, decreasing the number or frequency of relapse episodes, increasing latency between symptomatic episodes, increasing time to sustained progression, expediting remission, inducing remission, augmenting remission, speeding recovery, or increasing efficacy of or decreasing resistance to alternative therapeutics, and/or an increased survival time of the affected host animal, following administration of the agent or composition comprising the agent. A prophylactic effect may comprise a complete or partial avoidance/inhibition or a delay of decreased bone mineral density development/progression (such as, for example, a complete or partial avoidance/inhibition or a delay), and an increased survival time of the affected host animal, following administration of a therapeutic protocol. Treatment of decreased bone mineral density encompasses the treatment of subjects already diagnosed as having any form of decreased bone mineral density at any clinical stage or manifestation, the delay of the onset or evolution or aggravation or deterioration of the symptoms or signs of decreased bone mineral density, and/or preventing and/or reducing the severity of decreased bone mineral density.

[0091] The present disclosure also provides methods of identifying a subject having an increased risk of developing decreased bone mineral density. In some embodiments, the methods comprise determining or having determined the presence or absence of a WNT5B variant nucleic acid molecule (such as a genomic nucleic acid molecule, mRNA molecule, and/or cDNA molecule) encoding a WNT5B predicted loss-of-function polypeptide in a biological sample obtained from the subject. When the subject lacks a WNT5B variant nucleic acid molecule encoding a WNT5B predicted loss-of-function polypeptide (i.e., the subject is genotypically categorized as WNT5B reference), then the subject has an increased risk of developing decreased bone mineral density. When the subject has a WNT5B variant nucleic acid molecule encoding a WNT5B predicted loss-of-function polypeptide (i.e., the subject is heterozygous or homozygous for a WNT5B variant nucleic acid molecule), then the subject has a decreased risk of developing decreased bone mineral density compared to a subject that is WNT5B reference.

[0092] Having a single copy of a WNT5B variant nucleic acid molecule encoding a WNT5B predicted loss-of-function polypeptide is more protective of a subject from developing decreased bone mineral density than having no copies of a WNT5B variant nucleic acid molecule encoding a WNT5B predicted loss-of-function polypeptide. Without intending to be limited to any particular theory or mechanism of action, it is believed that a single copy of a WNT5B variant nucleic acid molecule encoding a WNT5B predicted loss-of-function polypeptide (i.e., heterozygous for a WNT5B variant nucleic acid molecule) is protective of a subject from developing decreased bone mineral density, and it is also believed that having two copies of a WNT5B variant nucleic acid molecule encoding a WNT5B predicted loss-of-function polypeptide (i.e., homozygous for a WNT5B variant nucleic acid molecule) may be more protective of a subject from developing decreased bone mineral density, relative to a subject with a single copy. Thus, in some embodiments, a single copy of a WNT5B variant nucleic acid molecule encoding a WNT5B predicted loss-of-function polypeptide may not be completely protective, but instead, may be partially or incompletely protective of a subject from developing decreased bone mineral density. While not desiring to be bound by any particular theory, there may be additional factors or molecules involved in the development of decreased bone mineral density that are still present in a subject having a single copy of a WNT5B variant nucleic acid molecule encoding a WNT5B predicted loss-of-function polypeptide, thus resulting in less than complete protection from the development of decreased bone mineral density.

[0093] Detecting the presence or absence of a WNT5B variant nucleic acid molecule encoding a WNT5B predicted loss-of-function polypeptide in a biological sample from the subject and/or determining whether a subject has a WNT5B variant nucleic acid molecule encoding a WNT5B predicted loss-of-function polypeptide can be carried out by any of the methods described herein. In some embodiments, these methods can be carried out in vitro. In some embodiments, these methods can be carried out in situ. In some embodiments, these methods can be carried out in vivo. In any of these embodiments, the WNT5B variant nucleic acid molecule encoding a WNT5B predicted loss-of-function polypeptide can be present within a cell obtained from the subject.

[0094] In some embodiments, when a subject is identified as having an increased risk of developing decreased bone mineral density, the subject is further treated with a therapeutic agent that treats or prevents decreased bone mineral density and/or a WNT5B inhibitor, as described herein. For example, when the subject is WNT5B reference, and therefore has an increased risk of developing decreased bone mineral density, the subject is administered a WNT5B inhibitor. In some embodiments, such a subject is also administered a therapeutic agent that treats or prevents decreased bone mineral density. In some embodiments, when the subject is heterozygous for a WNT5B variant nucleic acid molecule encoding a WNT5B predicted loss-of-function polypeptide, the subject is administered the therapeutic agent that treats or prevents decreased bone mineral density in a dosage amount that is the same as or less than a standard dosage amount, and is also administered a WNT5B inhibitor. In some embodiments, the subject is WNT5B reference. In some embodiments, the subject is heterozygous for a WNT5B variant nucleic acid molecule encoding a WNT5B predicted loss-of-function polypeptide.

[0095] The present disclosure also provides methods of detecting the presence or absence of a WNT5B variant genomic nucleic acid molecule encoding a WNT5B predicted loss-of-function polypeptide in a biological sample obtained from a subject, and/or a WNT5B variant mRNA molecule encoding a WNT5B predicted loss-of-function polypeptide in a biological sample obtained from a subject, and/or a WNT5B variant cDNA molecule encoding a WNT5B predicted loss-of-function polypeptide produced from an mRNA molecule in a biological sample obtained from a subject. It is understood that gene sequences within a population and mRNA molecules encoded by such genes can vary due to polymorphisms such as single-nucleotide polymorphisms. The sequences provided herein for the WNT5B variant genomic nucleic acid molecule, WNT5B variant mRNA molecule, and WNT5B variant cDNA molecule are only exemplary sequences. Other sequences for the WNT5B variant genomic nucleic acid molecule, variant mRNA molecule, and variant cDNA molecule are also possible.

[0096] The biological sample can be derived from any cell, tissue, or biological fluid from the subject. The biological sample may comprise any clinically relevant tissue such as, for example, a bone marrow sample, a tumor biopsy, a fine needle aspirate, or a sample of bodily fluid, such as blood, gingival crevicular fluid, plasma, serum, lymph, ascitic fluid, cystic fluid, or urine. In some embodiments, the biological sample comprises a buccal swab. The biological sample used in the methods disclosed herein can vary based on the assay format, nature of the detection method, and the tissues, cells, or extracts that are used as the sample. A biological sample can be processed differently depending on the assay being employed. For example, when detecting any WNT5B variant nucleic acid molecule, preliminary processing designed to isolate or enrich the biological sample for the WNT5B variant nucleic acid molecule can be employed. A variety of techniques may be used for this purpose. When detecting the level of any WNT5B variant mRNA molecule, different techniques can be used enrich the biological sample with mRNA molecules. Various methods to detect the presence or level of an mRNA molecule or the presence of a particular variant genomic DNA locus can be used.

[0097] The present disclosure also provides methods of detecting a WNT5B variant nucleic acid molecule, or the complement thereof, encoding a WNT5B predicted loss-of-function polypeptide in a subject. The methods comprise assaying a biological sample obtained from the subject to determine whether a nucleic acid molecule in the biological sample is a WNT5B variant nucleic acid molecule encoding a WNT5B predicted loss-of-function polypeptide.

[0098] In some embodiments, the WNT5B variant nucleic acid molecule encoding the WNT5B predicted loss-of-function polypeptide, or the complement thereof, is a genomic nucleic acid molecule having a nucleotide sequence comprising: a thymine at a position corresponding to position 56,698 according to SEQ ID NO:2, or the complement thereof; an adenine at a position corresponding to position 58,170 according to SEQ ID NO:3, or the complement thereof; a thymine at a position corresponding to position 65,099 according to SEQ ID NO:4, or the complement thereof; an adenine at a position corresponding to position 65,099 according to SEQ ID NO:5, or the complement thereof; or a deletion of a TC dinucleotide at positions corresponding to positions 71,313-71,314 according to SEQ ID NO:6, or the complement thereof.

[0099] In some embodiments, the WNT5B variant nucleic acid molecule encoding the WNT5B predicted loss-of-function polypeptide, or the complement thereof, is an mRNA molecule having a nucleotide sequence comprising: a uracil at a position corresponding to position 242 according to SEQ ID NO:15, or the complement thereof; a uracil at a position corresponding to position 145 according to SEQ ID NO:16, or the complement thereof; a uracil at a position corresponding to position 198 according to SEQ ID NO:17, or the complement thereof; a uracil at a position corresponding to position 40 according to SEQ ID NO:18, or the complement thereof; a uracil at a position corresponding to position 145 according to SEQ ID NO:19, or the complement thereof; a uracil at a position corresponding to position 183 according to SEQ ID NO:20, or the complement thereof; a uracil at a position corresponding to position 543 according to SEQ ID NO:21, or the complement thereof; an adenine at a position corresponding to position 491 according to SEQ ID NO:22, or the complement thereof; an adenine at a position corresponding to position 394 according to SEQ ID NO:23, or the complement thereof; an adenine at a position corresponding to position 447 according to SEQ ID NO:24, or the complement thereof; an adenine at a position corresponding to position 289 according to SEQ ID NO:25, or the complement thereof; an adenine at a position corresponding to position 394 according to SEQ ID NO:26, or the complement thereof; an adenine at a position corresponding to position 432 according to SEQ ID NO:27, or the complement thereof; an adenine at a position corresponding to position 792 according to SEQ ID NO:28, or the complement thereof; an adenine at a position corresponding to position 254 according to SEQ ID NO:29, or the complement thereof; a uracil at a position corresponding to position 642 according to SEQ ID NO:30, or the complement thereof; a uracil at a position corresponding to position 545 according to SEQ ID NO:31, or the complement thereof; a uracil at a position corresponding to position 598 according to SEQ ID NO:32, or the complement thereof; a uracil at a position corresponding to position 545 according to SEQ ID NO:33, or the complement thereof; a uracil at a position corresponding to position 583 according to SEQ ID NO:34, or the complement thereof; a uracil at a position corresponding to position 943 according to SEQ ID NO:35, or the complement thereof; a uracil at a position corresponding to position 405 according to SEQ ID NO:36, or the complement thereof; an adenine at a position corresponding to position 642 according to SEQ ID NO:37, or the complement thereof; an adenine at a position corresponding to position 545 according to SEQ ID NO:38, or the complement thereof; an adenine at a position corresponding to position 598 according to SEQ ID NO:39, or the complement thereof; an adenine at a position corresponding to position 545 according to SEQ ID NO:40, or the complement thereof; an adenine at a position corresponding to position 583 according to SEQ ID NO:41, or the complement thereof; an adenine at a position corresponding to position 943 according to SEQ ID NO:42, or the complement thereof; an adenine at a position corresponding to position 405 according to SEQ ID NO:43, or the complement thereof; a deletion of a UC dinucleotide at positions corresponding to positions 1,039-1,040 according to SEQ ID NO:44, or the complement thereof; a deletion of a UC dinucleotide at positions corresponding to positions 942-943 according to SEQ ID NO:45, or the complement thereof; a deletion of a UC dinucleotide at positions corresponding to positions 995-996 according to SEQ ID NO:46, or the complement thereof; a deletion of a UC dinucleotide at positions corresponding to positions 942-943 according to SEQ ID NO:47, or the complement thereof; a deletion of a UC dinucleotide at positions corresponding to positions 980-981 according to SEQ ID NO:48, or the complement thereof; or a deletion of a UC dinucleotide at positions corresponding to positions 802-803 according to SEQ ID NO:49, or the complement thereof.

[0100] In some embodiments, the WNT5B variant nucleic acid molecule encoding the WNT5B predicted loss-of-function polypeptide, or the complement thereof, is a cDNA molecule produced from an mRNA molecule in the biological sample having a nucleotide sequence comprising: a thymine at a position corresponding to position 242 according to SEQ ID NO:58, or the complement thereof; a thymine at a position corresponding to position 145 according to SEQ ID NO:59, or the complement thereof; a thymine at a position corresponding to position 198 according to SEQ ID NO:60, or the complement thereof; a thymine at a position corresponding to position 40 according to SEQ ID NO:61, or the complement thereof; a thymine at a position corresponding to position 145 according to SEQ ID NO:62, or the complement thereof; a thymine at a position corresponding to position 183 according to SEQ ID NO:63, or the complement thereof; a thymine at a position corresponding to position 543 according to SEQ ID NO:64, or the complement thereof; an adenine at a position corresponding to position 491 according to SEQ ID NO:65, or the complement thereof; an adenine at a position corresponding to position 394 according to SEQ ID NO:66, or the complement thereof; an adenine at a position corresponding to position 447 according to SEQ ID NO:67, or the complement thereof; an adenine at a position corresponding to position 289 according to SEQ ID NO:68, or the complement thereof; an adenine at a position corresponding to position 394 according to SEQ ID NO:69, or the complement thereof; an adenine at a position corresponding to position 432 according to SEQ ID NO:70, or the complement thereof; an adenine at a position corresponding to position 792 according to SEQ ID NO:71, or the complement thereof; an adenine at a position corresponding to position 254 according to SEQ ID NO:72, or the complement thereof; a thymine at a position corresponding to position 642 according to SEQ ID NO:73, or the complement thereof; a thymine at a position corresponding to position 545 according to SEQ ID NO:74, or the complement thereof; a thymine at a position corresponding to position 598 according to SEQ ID NO:75, or the complement thereof; a thymine at a position corresponding to position 545 according to SEQ ID NO:76, or the complement thereof; a thymine at a position corresponding to position 583 according to SEQ ID NO:77, or the complement thereof; a thymine at a position corresponding to position 943 according to SEQ ID NO:78, or the complement thereof; a thymine at a position corresponding to position 405 according to SEQ ID NO:79, or the complement thereof; an adenine at a position corresponding to position 642 according to SEQ ID NO:80, or the complement thereof; an adenine at a position corresponding to position 545 according to SEQ ID NO:81, or the complement thereof; an adenine at a position corresponding to position 598 according to SEQ ID NO:82, or the complement thereof; an adenine at a position corresponding to position 545 according to SEQ ID NO:83, or the complement thereof; an adenine at a position corresponding to position 583 according to SEQ ID NO:84, or the complement thereof; an adenine at a position corresponding to position 943 according to SEQ ID NO:85, or the complement thereof; an adenine at a position corresponding to position 405 according to SEQ ID NO:86, or the complement thereof; a deletion of a TC dinucleotide at positions corresponding to positions 1,039-1,040 according to SEQ ID NO:87, or the complement thereof; a deletion of a TC dinucleotide at positions corresponding to positions 942-943 according to SEQ ID NO:88, or the complement thereof; a deletion of a TC dinucleotide at positions corresponding to positions 995-996 according to SEQ ID NO:89, or the complement thereof; a deletion of a TC dinucleotide at positions corresponding to positions 942-943 according to SEQ ID NO:90, or the complement thereof; a deletion of a TC dinucleotide at positions corresponding to positions 980-981 according to SEQ ID NO:91, the complement thereof; or a deletion of a TC dinucleotide at positions corresponding to positions 802-803 according to SEQ ID NO:92, or the complement thereof.

[0101] In some embodiments, the WNT5B variant nucleic acid molecule has a nucleotide sequence comprising: i) a thymine at a position corresponding to position 56,698 according to SEQ ID NO:2 (for genomic nucleic acid molecules); ii) a uracil at a position corresponding to position 242 according to SEQ ID NO:15; a uracil at a position corresponding to position 145 according to SEQ ID NO:16; a uracil at a position corresponding to position 198 according to SEQ ID NO:17; a uracil at a position corresponding to position 40 according to SEQ ID NO:18; a uracil at a position corresponding to position 145 according to SEQ ID NO:19; a uracil at a position corresponding to position 183 according to SEQ ID NO:20; or a uracil at a position corresponding to position 543 according to SEQ ID NO:21 (for mRNA molecules); or iii) a thymine at a position corresponding to position 242 according to SEQ ID NO:58; a thymine at a position corresponding to position 145 according to SEQ ID NO:59; a thymine at a position corresponding to position 198 according to SEQ ID NO:60; a thymine at a position corresponding to position 40 according to SEQ ID NO:61; a thymine at a position corresponding to position 145 according to SEQ ID NO:62; a thymine at a position corresponding to position 183 according to SEQ ID NO:63; or a thymine at a position corresponding to position 543 according to SEQ ID NO:64 (for cDNA molecules obtained from mRNA molecules).

[0102] In some embodiments, the WNT5B variant nucleic acid molecule has a nucleotide sequence comprising: i) an adenine at a position corresponding to position 58,170 according to SEQ ID NO:3 (for genomic nucleic acid molecules); ii) an adenine at a position corresponding to position 491 according to SEQ ID NO:22; an adenine at a position corresponding to position 394 according to SEQ ID NO:23; an adenine at a position corresponding to position 447 according to SEQ ID NO:24; an adenine at a position corresponding to position 289 according to SEQ ID NO:25; an adenine at a position corresponding to position 394 according to SEQ ID NO:26; an adenine at a position corresponding to position 432 according to SEQ ID NO:27; an adenine at a position corresponding to position 792 according to SEQ ID NO:28; or an adenine at a position corresponding to position 254 according to SEQ ID NO:29; or iii) an adenine at a position corresponding to position 491 according to SEQ ID NO:65; an adenine at a position corresponding to position 394 according to SEQ ID NO:66; an adenine at a position corresponding to position 447 according to SEQ ID NO:67; an adenine at a position corresponding to position 289 according to SEQ ID NO:68; an adenine at a position corresponding to position 394 according to SEQ ID NO:69; an adenine at a position corresponding to position 432 according to SEQ ID NO:70; an adenine at a position corresponding to position 792 according to SEQ ID NO:71; or an adenine at a position corresponding to position 254 according to SEQ ID NO:72 (for cDNA molecules obtained from mRNA molecules).

[0103] In some embodiments, the WNT5B variant nucleic acid molecule has a nucleotide sequence comprising: i) a thymine at a position corresponding to position 65,099 according to SEQ ID NO:4 (for genomic nucleic acid molecules); ii) a uracil at a position corresponding to position 642 according to SEQ ID NO:30; a uracil at a position corresponding to position 545 according to SEQ ID NO:31; a uracil at a position corresponding to position 598 according to SEQ ID NO:32; a uracil at a position corresponding to position 545 according to SEQ ID NO:33; a uracil at a position corresponding to position 583 according to SEQ ID NO:34; a uracil at a position corresponding to position 943 according to SEQ ID NO:35; or a uracil at a position corresponding to position 405 according to SEQ ID NO:36; or iii) a thymine at a position corresponding to position 642 according to SEQ ID NO:73; a thymine at a position corresponding to position 545 according to SEQ ID NO:74; or a thymine at a position corresponding to position 598 according to SEQ ID NO:75; a thymine at a position corresponding to position 545 according to SEQ ID NO:76; a thymine at a position corresponding to position 583 according to SEQ ID NO:77; a thymine at a position corresponding to position 943 according to SEQ ID NO:78; or a thymine at a position corresponding to position 405 according to SEQ ID NO:79 (for cDNA molecules obtained from mRNA molecules).

[0104] In some embodiments, the WNT5B variant nucleic acid molecule has a nucleotide sequence comprising: i) an adenine at a position corresponding to position 65,099 according to SEQ ID NO:5 (for genomic nucleic acid molecules); ii) an adenine at a position corresponding to position 642 according to SEQ ID NO:37; an adenine at a position corresponding to position 545 according to SEQ ID NO:38; an adenine at a position corresponding to position 598 according to SEQ ID NO:39; an adenine at a position corresponding to position 545 according to SEQ ID NO:40; an adenine at a position corresponding to position 583 according to SEQ ID NO:41; an adenine at a position corresponding to position 943 according to SEQ ID NO:42; or an adenine at a position corresponding to position 405 according to SEQ ID NO:43; or iii) an adenine at a position corresponding to position 642 according to SEQ ID NO:80; an adenine at a position corresponding to position 545 according to SEQ ID NO:81; an adenine at a position corresponding to position 598 according to SEQ ID NO:82; an adenine at a position corresponding to position 545 according to SEQ ID NO:83; an adenine at a position corresponding to position 583 according to SEQ ID NO:84; an adenine at a position corresponding to position 943 according to SEQ ID NO:85; or an adenine at a position corresponding to position 405 according to SEQ ID NO:86 (for cDNA molecules obtained from mRNA molecules).

[0105] In some embodiments, the WNT5B variant nucleic acid molecule has a nucleotide sequence comprising: i) a deletion of a TC dinucleotide at positions corresponding to positions 71,313-71,314 according to SEQ ID NO:6 (for genomic nucleic acid molecules); ii) a deletion of a UC dinucleotide at positions corresponding to positions 1,039-1,040 according to SEQ ID NO:44; a deletion of a UC dinucleotide at positions corresponding to positions 942-943 according to SEQ ID NO:45; a deletion of a UC dinucleotide at positions corresponding to positions 995-996 according to SEQ ID NO:46; a deletion of a UC dinucleotide at positions corresponding to positions 942-943 according to SEQ ID NO:47; a deletion of a UC dinucleotide at positions corresponding to positions 980-981 according to SEQ ID NO:48; or a deletion of a UC dinucleotide at positions corresponding to positions 802-803 according to SEQ ID NO:49; or iii) a deletion of a TC dinucleotide at positions corresponding to positions 1,039-1,040 according to SEQ ID NO:87; a deletion of a TC dinucleotide at positions corresponding to positions 942-943 according to SEQ ID NO:88; a deletion of a TC dinucleotide at positions corresponding to positions 995-996 according to SEQ ID NO:89; a deletion of a TC dinucleotide at positions corresponding to positions 942-943 according to SEQ ID NO:90; a deletion of a TC dinucleotide at positions corresponding to positions 980-981 according to SEQ ID NO:91; or a deletion of a TC dinucleotide at positions corresponding to positions 802-803 according to SEQ ID NO:92 (for cDNA molecules obtained from mRNA molecules).

[0106] In some embodiments, the biological sample comprises a cell or cell lysate. Such methods can further comprise, for example, obtaining a biological sample from the subject comprising a WNT5B genomic nucleic acid molecule or mRNA molecule, and if mRNA, optionally reverse transcribing the mRNA into cDNA. Such assays can comprise, for example determining the identity of these positions of the particular WNT5B nucleic acid molecule. In some embodiments, the method is an in vitro method.

[0107] In some embodiments, the determining step, detecting step, or sequence analysis comprises sequencing at least a portion of the nucleotide sequence of the WNT5B genomic nucleic acid molecule, the WNT5B mRNA molecule, or the WNT5B cDNA molecule produced from the mRNA molecule in the biological sample, wherein the sequenced portion comprises one or more variations that cause a loss-of-function (partial or complete) or are predicted to cause a loss-of-function (partial or complete).

[0108] In some embodiments, the determining step, detecting step, or sequence analysis comprises sequencing at least a portion of: i) the nucleotide sequence of the WNT5B genomic nucleic acid molecule in the biological sample, wherein the sequenced portion comprises a position corresponding to position 56,698 according to SEQ ID NO:2, or the complement thereof; ii) the nucleotide sequence of the WNT5B mRNA molecule in the biological sample, wherein the sequenced portion comprises a position corresponding to: position 242 according to SEQ ID NO:15, or the complement thereof; position 145 according to SEQ ID NO:16, or the complement thereof; position 198 according to SEQ ID NO:17, or the complement thereof; position 40 according to SEQ ID NO:18, or the complement thereof; position 145 according to SEQ ID NO:19, or the complement thereof; position 183 according to SEQ ID NO:20, or the complement thereof; or position 543 according to SEQ ID NO:21, or the complement thereof; and/or iii) the nucleotide sequence of the WNT5B cDNA molecule produced from the mRNA in the biological sample, wherein the sequenced portion comprises a position corresponding to: position 242 according to SEQ ID NO:58, or the complement thereof; position 145 according to SEQ ID NO:59, or the complement thereof; position 198 according to SEQ ID NO:60, or the complement thereof; position 40 according to SEQ ID NO:61, or the complement thereof; position 145 according to SEQ ID NO:62, or the complement thereof; or position 183 according to SEQ ID NO:63, or the complement thereof; position 543 according to SEQ ID NO:64, or the complement thereof. When the sequenced portion of the WNT5B nucleic acid molecule in the biological sample comprises: a thymine at a position corresponding to position 56,698 according to SEQ ID NO:2, a uracil at a position corresponding to position 242 according to SEQ ID NO:15, a uracil at a position corresponding to position 145 according to SEQ ID NO:16, a uracil at a position corresponding to position 198 according to SEQ ID NO:17, a uracil at a position corresponding to position 40 according to SEQ ID NO:18, a uracil at a position corresponding to position 145 according to SEQ ID NO:19, a uracil at a position corresponding to position 183 according to SEQ ID NO:20, a uracil at a position corresponding to position 543 according to SEQ ID NO:21, a thymine at a position corresponding to position 242 according to SEQ ID NO:58, a thymine at a position corresponding to position 145 according to SEQ ID NO:59, a thymine at a position corresponding to position 198 according to SEQ ID NO:60, a thymine at a position corresponding to position 40 according to SEQ ID NO:61, a thymine at a position corresponding to position 145 according to SEQ ID NO:62, a thymine at a position corresponding to position 183 according to SEQ ID NO:63, or a thymine at a position corresponding to position 543 according to SEQ ID NO:64, then the WNT5B nucleic acid molecule in the biological sample is a WNT5B variant nucleic acid molecule encoding a WNT5B predicted loss-of-function polypeptide.

[0109] In some embodiments, the determining step, detecting step, or sequence analysis comprises sequencing at least a portion of: i) the nucleotide sequence of the WNT5B genomic nucleic acid molecule in the biological sample, wherein the sequenced portion comprises a position corresponding to position 58,170 according to SEQ ID NO:3, or the complement thereof; ii) the nucleotide sequence of the WNT5B mRNA molecule in the biological sample, wherein the sequenced portion comprises a position corresponding to: position 491 according to SEQ ID NO:22, or the complement thereof; position 394 according to SEQ ID NO:23, or the complement thereof; position 447 according to SEQ ID NO:24, or the complement thereof; position 289 according to SEQ ID NO:25, or the complement thereof; position 394 according to SEQ ID NO:26, or the complement thereof; position 432 according to SEQ ID NO:27, or the complement thereof; position 792 according to SEQ ID NO:28, or the complement thereof; or position 254 according to SEQ ID NO:29, or the complement thereof; and/or iii) the nucleotide sequence of the WNT5B cDNA molecule produced from the mRNA in the biological sample, wherein the sequenced portion comprises a position corresponding to: position 491 according to SEQ ID NO:65, or the complement thereof; position 394 according to SEQ ID NO:66, or the complement thereof; position 447 according to SEQ ID NO:67, or the complement thereof; position 289 according to SEQ ID NO:68, or the complement thereof; position 394 according to SEQ ID NO:69, or the complement thereof; position 432 according to SEQ ID NO:70, or the complement thereof; position 792 according to SEQ ID NO:71, or the complement thereof; or position 254 according to SEQ ID NO:72, or the complement thereof. When the sequenced portion of the WNT5B nucleic acid molecule in the biological sample comprises: an adenine at a position corresponding to position 58,170 according to SEQ ID NO:3, an adenine at a position corresponding to position 491 according to SEQ ID NO:22, an adenine at a position corresponding to position 394 according to SEQ ID NO:23, an adenine at a position corresponding to position 447 according to SEQ ID NO:24, an adenine at a position corresponding to position 289 according to SEQ ID NO:25, an adenine at a position corresponding to position 394 according to SEQ ID NO:26, an adenine at a position corresponding to position 432 according to SEQ ID NO:27, an adenine at a position corresponding to position 792 according to SEQ ID NO:28, an adenine at a position corresponding to position 254 according to SEQ ID NO:29, an adenine at a position corresponding to position 491 according to SEQ ID NO:65, an adenine at a position corresponding to position 394 according to SEQ ID NO:66, an adenine at a position corresponding to position 447 according to SEQ ID NO:67, an adenine at a position corresponding to position 289 according to SEQ ID NO:68, an adenine at a position corresponding to position 394 according to SEQ ID NO:69, an adenine at a position corresponding to position 432 according to SEQ ID NO:70, an adenine at a position corresponding to position 792 according to SEQ ID NO:71, or an adenine at a position corresponding to position 254 according to SEQ ID NO:72, then the WNT5B nucleic acid molecule in the biological sample is a WNT5B variant nucleic acid molecule encoding a WNT5B predicted loss-of-function polypeptide.

[0110] In some embodiments, the determining step, detecting step, or sequence analysis comprises sequencing at least a portion of: i) the nucleotide sequence of the WNT5B genomic nucleic acid molecule in the biological sample, wherein the sequenced portion comprises a position corresponding to position 65,099 according to SEQ ID NO:4, or the complement thereof; ii) the nucleotide sequence of the WNT5B mRNA molecule in the biological sample, wherein the sequenced portion comprises a position corresponding to: position 642 according to SEQ ID NO:30, or the complement thereof; position 545 according to SEQ ID NO:31, or the complement thereof; position 598 according to SEQ ID NO:32, or the complement thereof; position 545 according to SEQ ID NO:33, or the complement thereof; position 583 according to SEQ ID NO:34, or the complement thereof; position 943 according to SEQ ID NO:35, or the complement thereof; or position 405 according to SEQ ID NO:36, or the complement thereof; and/or iii) the nucleotide sequence of the WNT5B cDNA molecule produced from the mRNA in the biological sample, wherein the sequenced portion comprises a position corresponding to: position 642 according to SEQ ID NO:73, or the complement thereof; position 545 according to SEQ ID NO:74, or the complement thereof; position 598 according to SEQ ID NO:75, or the complement thereof; position 545 according to SEQ ID NO:76, or the complement thereof; position 583 according to SEQ ID NO:77, or the complement thereof; position 943 according to SEQ ID NO:78, or the complement thereof; or position 405 according to SEQ ID NO:79, or the complement thereof. When the sequenced portion of the WNT5B nucleic acid molecule in the biological sample comprises: a thymine at a position corresponding to position 65,099 according to SEQ ID NO:4, a uracil at a position corresponding to position 642 according to SEQ ID NO:30, a uracil at a position corresponding to position 545 according to SEQ ID NO:31, a uracil at a position corresponding to position 598 according to SEQ ID NO:32, a uracil at a position corresponding to position 545 according to SEQ ID NO:33, a uracil at a position corresponding to position 583 according to SEQ ID NO:34, a uracil at a position corresponding to position 943 according to SEQ ID NO:35, or a uracil at a position corresponding to position 405 according to SEQ ID NO:36, a thymine at a position corresponding to position 642 according to SEQ ID NO:73, a thymine at a position corresponding to position 545 according to SEQ ID NO:74, a thymine at a position corresponding to position 598 according to SEQ ID NO:75, a thymine at a position corresponding to position 545 according to SEQ ID NO:76, a thymine at a position corresponding to position 583 according to SEQ ID NO:77, a thymine at a position corresponding to position 943 according to SEQ ID NO:78, or a thymine at a position corresponding to position 405 according to SEQ ID NO:79, then the WNT5B nucleic acid molecule in the biological sample is a WNT5B variant nucleic acid molecule encoding a WNT5B predicted loss-of-function polypeptide.

[0111] In some embodiments, the determining step, detecting step, or sequence analysis comprises sequencing at least a portion of: i) the nucleotide sequence of the WNT5B genomic nucleic acid molecule in the biological sample, wherein the sequenced portion comprises a position corresponding to position 65,099 according to SEQ ID NO:5, or the complement thereof; ii) the nucleotide sequence of the WNT5B mRNA molecule in the biological sample, wherein the sequenced portion comprises a position corresponding to: position 642 according to SEQ ID NO:37, or the complement thereof; position 545 according to SEQ ID NO:38, or the complement thereof; position 598 according to SEQ ID NO:39, or the complement thereof; position 545 according to SEQ ID NO:40, or the complement thereof; position 583 according to SEQ ID NO:41, or the complement thereof; position 943 according to SEQ ID NO:42, or the complement thereof; or position 405 according to SEQ ID NO:43, or the complement thereof; and/or iii) the nucleotide sequence of the WNT5B cDNA molecule produced from the mRNA in the biological sample, wherein the sequenced portion comprises a position corresponding to: position 642 according to SEQ ID NO:80, or the complement thereof; position 545 according to SEQ ID NO:81, or the complement thereof; position 598 according to SEQ ID NO:82, or the complement thereof; position 545 according to SEQ ID NO:83, or the complement thereof; position 583 according to SEQ ID NO:84, or the complement thereof; position 943 according to SEQ ID NO:85, or the complement thereof; or position 405 according to SEQ ID NO:86, or the complement thereof. When the sequenced portion of the WNT5B nucleic acid molecule in the biological sample comprises: an adenine at a position corresponding to position 65,099 according to SEQ ID NO:5, an adenine at a position corresponding to position 642 according to SEQ ID NO:37, an adenine at a position corresponding to position 545 according to SEQ ID NO:38, an adenine at a position corresponding to position 598 according to SEQ ID NO:39, an adenine at a position corresponding to position 545 according to SEQ ID NO:40, an adenine at a position corresponding to position 583 according to SEQ ID NO:41, an adenine at a position corresponding to position 943 according to SEQ ID NO:42, an adenine at a position corresponding to position 405 according to SEQ ID NO:43, an adenine at a position corresponding to position 642 according to SEQ ID NO:80, an adenine at a position corresponding to position 545 according to SEQ ID NO:81, an adenine at a position corresponding to position 598 according to SEQ ID NO:82, an adenine at a position corresponding to position 545 according to SEQ ID NO:83, an adenine at a position corresponding to position 583 according to SEQ ID NO:84, an adenine at a position corresponding to position 943 according to SEQ ID NO:85, or an adenine at a position corresponding to position 405 according to SEQ ID NO:86, then the WNT5B nucleic acid molecule in the biological sample is a WNT5B variant nucleic acid molecule encoding a WNT5B predicted loss-of-function polypeptide.

[0112] In some embodiments, the determining step, detecting step, or sequence analysis comprises sequencing at least a portion of: i) the nucleotide sequence of the WNT5B genomic nucleic acid molecule in the biological sample, wherein the sequenced portion comprises positions corresponding to positions 71,313-71,314 according to SEQ ID NO:6, or the complement thereof; ii) the nucleotide sequence of the WNT5B mRNA molecule in the biological sample, wherein the sequenced portion comprises a position corresponding to: positions 1,039-1,040 according to SEQ ID NO:44, or the complement thereof; positions 942-943 according to SEQ ID NO:45, or the complement thereof; positions 995-996 according to SEQ ID NO:46, or the complement thereof; positions 942-943 according to SEQ ID NO:47, or the complement thereof; positions 980-981 according to SEQ ID NO:48, or the complement thereof; or positions 802-803 according to SEQ ID NO:49, or the complement thereof; and/or iii) the nucleotide sequence of the WNT5B cDNA molecule produced from the mRNA in the biological sample, wherein the sequenced portion comprises a position corresponding to: positions 1,039-1,040 according to SEQ ID NO:87, or the complement thereof; positions 942-943 according to SEQ ID NO:88, or the complement thereof; positions 995-996 according to SEQ ID NO:89, or the complement thereof; positions 942-943 according to SEQ ID NO:90, or the complement thereof; positions 980-981 according to SEQ ID NO:91, or the complement thereof; or positions 802-803 according to SEQ ID NO:92, or the complement thereof. When the sequenced portion of the WNT5B nucleic acid molecule in the biological sample comprises: a deletion of a TC dinucleotide at positions corresponding to positions 71,313-71,314 according to SEQ ID NO:6, a deletion of a UC dinucleotide at positions corresponding to positions 1,039-1,040 according to SEQ ID NO:44, a deletion of a UC dinucleotide at positions corresponding to positions 942-943 according to SEQ ID NO:45, a deletion of a UC dinucleotide at positions corresponding to positions 995-996 according to SEQ ID NO:46, a deletion of a UC dinucleotide at positions corresponding to positions 942-943 according to SEQ ID NO:47, a deletion of a UC dinucleotide at positions corresponding to positions 980-981 according to SEQ ID NO:48, a deletion of a UC dinucleotide at positions corresponding to positions 802-803 according to SEQ ID NO:49, a deletion of a TC dinucleotide at positions corresponding to positions 1,039-1,040 according to SEQ ID NO:87, a deletion of a TC dinucleotide at positions corresponding to positions 942-943 according to SEQ ID NO:88, a deletion of a TC dinucleotide at positions corresponding to positions 995-996 according to SEQ ID NO:89, a deletion of a TC dinucleotide at positions corresponding to positions 942-943 according to SEQ ID NO:90, a deletion of a TC dinucleotide at positions corresponding to positions 980-981 according to SEQ ID NO:91, or a deletion of a TC dinucleotide at positions corresponding to positions 802-803 according to SEQ ID NO:92, then the WNT5B nucleic acid molecule in the biological sample is a WNT5B variant nucleic acid molecule encoding a WNT5B predicted loss-of-function polypeptide.

[0113] In some embodiments, the determining step, detecting step, or sequence analysis comprises sequencing at least a portion of the nucleotide sequence of the WNT5B genomic nucleic acid molecule in the biological sample, wherein the sequenced portion comprises a position corresponding to: position 56,698 according to SEQ ID NO:2, or the complement thereof; position 58,170 according to SEQ ID NO:3, or the complement thereof; position 65,099 according to SEQ ID NO:4, or the complement thereof; position 65,099 according to SEQ ID NO:5, or the complement thereof; or positions 71,313-71,314 according to SEQ ID NO:6, or the complement thereof. When the sequenced portion of the WNT5B nucleic acid molecule in the biological sample comprises: a thymine at a position corresponding to position 56,698 according to SEQ ID NO:2, an adenine at a position corresponding to position 58,170 according to SEQ ID NO:3, a thymine at a position corresponding to position 65,099 according to SEQ ID NO:4, an adenine at a position corresponding to position 65,099 according to SEQ ID NO:5, or a deletion of a TC dinucleotide at positions corresponding to positions 71,313-71,314 according to SEQ ID NO:6, then the WNT5B nucleic acid molecule in the biological sample is a WNT5B variant genomic nucleic acid molecule encoding a WNT5B predicted loss-of-function polypeptide.

[0114] In some embodiments, the determining step, detecting step, or sequence analysis comprises sequencing at least a portion of the nucleotide sequence of the WNT5B mRNA molecule in the biological sample, wherein the sequenced portion comprises a position corresponding to: position 242 according to SEQ ID NO:15, or the complement thereof; position 145 according to SEQ ID NO:16, or the complement thereof; position 198 according to SEQ ID NO:17, or the complement thereof; position 40 according to SEQ ID NO:18, or the complement thereof; position 145 according to SEQ ID NO:19, or the complement thereof; position 183 according to SEQ ID NO:20, or the complement thereof; position 543 according to SEQ ID NO:21, or the complement thereof; position 491 according to SEQ ID NO:22, or the complement thereof; position 394 according to SEQ ID NO:23, or the complement thereof; position 447 according to SEQ ID NO:24, or the complement thereof; position 289 according to SEQ ID NO:25, or the complement thereof; position 394 according to SEQ ID NO:26, or the complement thereof; position 432 according to SEQ ID NO:27, or the complement thereof; position 792 according to SEQ ID NO:28, or the complement thereof; position 254 according to SEQ ID NO:29, or the complement thereof; position 642 according to SEQ ID NO:30, or the complement thereof; position 545 according to SEQ ID NO:31, or the complement thereof; position 598 according to SEQ ID NO:32, or the complement thereof; position 545 according to SEQ ID NO:33, or the complement thereof; position 583 according to SEQ ID NO:34, or the complement thereof; position 943 according to SEQ ID NO:35, or the complement thereof; position 405 according to SEQ ID NO:36, or the complement thereof; position 642 according to SEQ ID NO:37, or the complement thereof; position 545 according to SEQ ID NO:38, or the complement thereof; position 598 according to SEQ ID NO:39, or the complement thereof; position 545 according to SEQ ID NO:40, or the complement thereof; position 583 according to SEQ ID NO:41, or the complement thereof; position 943 according to SEQ ID NO:42, or the complement thereof; position 405 according to SEQ ID NO:43, or the complement thereof; positions 1,039-1,040 according to SEQ ID NO:44, or the complement thereof; positions 942-943 according to SEQ ID NO:45, or the complement thereof; positions 995-996 according to SEQ ID NO:46, or the complement thereof; positions 942-943 according to SEQ ID NO:47, or the complement thereof; positions 980-981 according to SEQ ID NO:48, or the complement thereof; or positions 802-803 according to SEQ ID NO:49, or the complement thereof, or the complement thereof. When the sequenced portion of the WNT5B mRNA molecule in the biological sample comprises: a uracil at a position corresponding to position 242 according to SEQ ID NO:15, a uracil at a position corresponding to position 145 according to SEQ ID NO:16, a uracil at a position corresponding to position 198 according to SEQ ID NO:17, a uracil at a position corresponding to position 40 according to SEQ ID NO:18, a uracil at a position corresponding to position 145 according to SEQ ID NO:19, a uracil at a position corresponding to position 183 according to SEQ ID NO:20, a uracil at a position corresponding to position 543 according to SEQ ID NO:21, an adenine at a position corresponding to position 491 according to SEQ ID NO:22, an adenine at a position corresponding to position 394 according to SEQ ID NO:23, an adenine at a position corresponding to position 447 according to SEQ ID NO:24, an adenine at a position corresponding to position 289 according to SEQ ID NO:25, an adenine at a position corresponding to position 394 according to SEQ ID NO:26, an adenine at a position corresponding to position 432 according to SEQ ID NO:27, an adenine at a position corresponding to position 792 according to SEQ ID NO:28, an adenine at a position corresponding to position 254 according to SEQ ID NO:29, a uracil at a position corresponding to position 642 according to SEQ ID NO:30, a uracil at a position corresponding to position 545 according to SEQ ID NO:31, a uracil at a position corresponding to position 598 according to SEQ ID NO:32, a uracil at a position corresponding to position 545 according to SEQ ID NO:33, a uracil at a position corresponding to position 583 according to SEQ ID NO:34, a uracil at a position corresponding to position 943 according to SEQ ID NO:35, a uracil at a position corresponding to position 405 according to SEQ ID NO:36, an adenine at a position corresponding to position 642 according to SEQ ID NO:37, an adenine at a position corresponding to position 545 according to SEQ ID NO:38, an adenine at a position corresponding to position 598 according to SEQ ID NO:39, an adenine at a position corresponding to position 545 according to SEQ ID NO:40, an adenine at a position corresponding to position 583 according to SEQ ID NO:41, an adenine at a position corresponding to position 943 according to SEQ ID NO:42, an adenine at a position corresponding to position 405 according to SEQ ID NO:43, a deletion of a UC dinucleotide at positions corresponding to positions 1,039-1,040 according to SEQ ID NO:44, a deletion of a UC dinucleotide at positions corresponding to positions 942-943 according to SEQ ID NO:45, a deletion of a UC dinucleotide at positions corresponding to positions 995-996 according to SEQ ID NO:46, a deletion of a UC dinucleotide at positions corresponding to positions 942-943 according to SEQ ID NO:47, a deletion of a UC dinucleotide at positions corresponding to positions 980-981 according to SEQ ID NO:48, or a deletion of a UC dinucleotide at positions corresponding to positions 802-803 according to SEQ ID NO:49, then the WNT5B nucleic acid molecule in the biological sample is a WNT5B variant mRNA molecule encoding a WNT5B predicted loss-of-function polypeptide.

[0115] In some embodiments, the determining step, detecting step, or sequence analysis comprises sequencing at least a portion of the nucleotide sequence of the WNT5B cDNA molecule produced from the mRNA molecule in the biological sample, wherein the sequenced portion comprises a position corresponding to: position 242 according to SEQ ID NO:58, or the complement thereof; position 145 according to SEQ ID NO:59, or the complement thereof; position 198 according to SEQ ID NO:60, or the complement thereof; position 40 according to SEQ ID NO:61, or the complement thereof; position 145 according to SEQ ID NO:62, or the complement thereof; position 183 according to SEQ ID NO:63, or the complement thereof; position 543 according to SEQ ID NO:64, or the complement thereof; position 491 according to SEQ ID NO:65, or the complement thereof; position 394 according to SEQ ID NO:66, or the complement thereof; position 447 according to SEQ ID NO:67, or the complement thereof; position 289 according to SEQ ID NO:68, or the complement thereof; position 394 according to SEQ ID NO:69, or the complement thereof; position 432 according to SEQ ID NO:70, or the complement thereof; position 792 according to SEQ ID NO:71, or the complement thereof; position 254 according to SEQ ID NO:72, or the complement thereof; position 642 according to SEQ ID NO:73, or the complement thereof; position 545 according to SEQ ID NO:74, or the complement thereof; position 598 according to SEQ ID NO:75, or the complement thereof; position 545 according to SEQ ID NO:76, or the complement thereof; position 583 according to SEQ ID NO:77, or the complement thereof; position 943 according to SEQ ID NO:78, or the complement thereof; position 405 according to SEQ ID NO:79, or the complement thereof; position 642 according to SEQ ID NO:80, or the complement thereof; position 545 according to SEQ ID NO:81, or the complement thereof; position 598 according to SEQ ID NO:82, or the complement thereof; position 545 according to SEQ ID NO:83, or the complement thereof; position 583 according to SEQ ID NO:84, or the complement thereof; position 943 according to SEQ ID NO:85, or the complement thereof; position 405 according to SEQ ID NO:86, or the complement thereof; positions 1,039-1,040 according to SEQ ID NO:87, or the complement thereof; positions 942-943 according to SEQ ID NO:88, or the complement thereof; positions 995-996 according to SEQ ID NO:89, or the complement thereof; positions 942-943 according to SEQ ID NO:90, or the complement thereof; positions 980-981 according to SEQ ID NO:91, or the complement thereof; or positions 802-803 according to SEQ ID NO:92, or the complement thereof. When the sequenced portion of the WNT5B cDNA molecule in the biological sample comprises: a thymine at a position corresponding to position 242 according to SEQ ID NO:58, a thymine at a position corresponding to position 145 according to SEQ ID NO:59, a thymine at a position corresponding to position 198 according to SEQ ID NO:60, a thymine at a position corresponding to position 40 according to SEQ ID NO:61, a thymine at a position corresponding to position 145 according to SEQ ID NO:62, a thymine at a position corresponding to position 183 according to SEQ ID NO:63, a thymine at a position corresponding to position 543 according to SEQ ID NO:64, an adenine at a position corresponding to position 491 according to SEQ ID NO:65, an adenine at a position corresponding to position 394 according to SEQ ID NO:66, an adenine at a position corresponding to position 447 according to SEQ ID NO:67, an adenine at a position corresponding to position 289 according to SEQ ID NO:68, an adenine at a position corresponding to position 394 according to SEQ ID NO:69, an adenine at a position corresponding to position 432 according to SEQ ID NO:70, an adenine at a position corresponding to position 792 according to SEQ ID NO:71, an adenine at a position corresponding to position 254 according to SEQ ID NO:72, a thymine at a position corresponding to position 642 according to SEQ ID NO:73, a thymine at a position corresponding to position 545 according to SEQ ID NO:74, a thymine at a position corresponding to position 598 according to SEQ ID NO:75, a thymine at a position corresponding to position 545 according to SEQ ID NO:76, a thymine at a position corresponding to position 583 according to SEQ ID NO:77, a thymine at a position corresponding to position 943 according to SEQ ID NO:78, a thymine at a position corresponding to position 405 according to SEQ ID NO:79, an adenine at a position corresponding to position 642 according to SEQ ID NO:80, an adenine at a position corresponding to position 545 according to SEQ ID NO:81, an adenine at a position corresponding to position 598 according to SEQ ID NO:82, an adenine at a position corresponding to position 545 according to SEQ ID NO:83, an adenine at a position corresponding to position 583 according to SEQ ID NO:84, an adenine at a position corresponding to position 943 according to SEQ ID NO:85, an adenine at a position corresponding to position 405 according to SEQ ID NO:86, a deletion of a TC dinucleotide at positions corresponding to positions 1,039-1,040 according to SEQ ID NO:87, a deletion of a TC dinucleotide at positions corresponding to positions 942-943 according to SEQ ID NO:88, a deletion of a TC dinucleotide at positions corresponding to positions 995-996 according to SEQ ID NO:89, a deletion of a TC dinucleotide at positions corresponding to positions 942-943 according to SEQ ID NO:90, a deletion of a TC dinucleotide at positions corresponding to positions 980-981 according to SEQ ID NO:91, or a deletion of a TC dinucleotide at positions corresponding to positions 802-803 according to SEQ ID NO:92, then the WNT5B nucleic acid molecule in the biological sample is a WNT5B variant cDNA molecule encoding a WNT5B predicted loss-of-function polypeptide.

[0116] In some embodiments, the determining step, detecting step, or sequence analysis comprises: a) contacting the biological sample with a primer hybridizing to a portion of the nucleotide sequence of the WNT5B: i) genomic nucleic acid molecule, or the complement thereof, that is proximate to a position corresponding to position 56,698 according to SEQ ID NO:2, or the complement thereof; ii) mRNA molecule, or the complement thereof, that is proximate to a position corresponding to: position 242 according to SEQ ID NO:15, or the complement thereof; position 145 according to SEQ ID NO:16, or the complement thereof; position 198 according to SEQ ID NO:17, or the complement thereof; position 40 according to SEQ ID NO:18, or the complement thereof; position 145 according to SEQ ID NO:19, or the complement thereof; position 183 according to SEQ ID NO:20, or the complement thereof; or position 543 according to SEQ ID NO:21, or the complement thereof; and/or iii) cDNA molecule, or the complement thereof, that is proximate to a position corresponding to: position 242 according to SEQ ID NO:58, or the complement thereof; position 145 according to SEQ ID NO:59, or the complement thereof; position 198 according to SEQ ID NO:60, or the complement thereof; position 40 according to SEQ ID NO:61, or the complement thereof; position 145 according to SEQ ID NO:62, or the complement thereof; position 183 according to SEQ ID NO:63, or the complement thereof; position 543 according to SEQ ID NO:64, or the complement thereof; b) extending the primer at least through the position of the nucleotide sequence of the WNT5B: i) genomic nucleic acid molecule, or the complement thereof, corresponding to position 56,698 according to SEQ ID NO:2, or the complement thereof; ii) mRNA molecule, or the complement thereof, corresponding to: position 242 according to SEQ ID NO:15, or the complement thereof; position 145 according to SEQ ID NO:16, or the complement thereof; position 198 according to SEQ ID NO:17, or the complement thereof; position 40 according to SEQ ID NO:18, or the complement thereof; position 145 according to SEQ ID NO:19, or the complement thereof; position 183 according to SEQ ID NO:20, or the complement thereof; or position 543 according to SEQ ID NO:21, or the complement thereof; and/or iii) cDNA molecule, or the complement thereof, corresponding to: position 242 according to SEQ ID NO:58, or the complement thereof; position 145 according to SEQ ID NO:59, or the complement thereof; position 198 according to SEQ ID NO:60, or the complement thereof; position 40 according to SEQ ID NO:61, or the complement thereof; position 145 according to SEQ ID NO:62, or the complement thereof; position 183 according to SEQ ID NO:63, or the complement thereof; or position 543 according to SEQ ID NO:64, or the complement thereof; and c) determining whether the extension product of the primer comprises: a thymine at a position corresponding to position 56,698 according to SEQ ID NO:2, or the complement thereof; a uracil at a position corresponding to position 242 according to SEQ ID NO:15, or the complement thereof; a uracil at a position corresponding to position 145 according to SEQ ID NO:16, or the complement thereof; a uracil at a position corresponding to position 198 according to SEQ ID NO:17, or the complement thereof; a uracil at a position corresponding to position 40 according to SEQ ID NO:18, or the complement thereof; a uracil at a position corresponding to position 145 according to SEQ ID NO:19, or the complement thereof; a uracil at a position corresponding to position 183 according to SEQ ID NO:20, or the complement thereof; a uracil at a position corresponding to position 543 according to SEQ ID NO:21, or the complement thereof; a thymine at a position corresponding to position 242 according to SEQ ID NO:58, or the complement thereof; a thymine at a position corresponding to position 145 according to SEQ ID NO:59, or the complement thereof; a thymine at a position corresponding to position 198 according to SEQ ID NO:60, or the complement thereof; a thymine at a position corresponding to position 40 according to SEQ ID NO:61, or the complement thereof; a thymine at a position corresponding to position 145 according to SEQ ID NO:62, or the complement thereof; a thymine at a position corresponding to position 183 according to SEQ ID NO:63, or the complement thereof; a thymine at a position corresponding to position 543 according to SEQ ID NO:64, or the complement thereof.

[0117] In some embodiments, the determining step, detecting step, or sequence analysis comprises: a) contacting the biological sample with a primer hybridizing to a portion of the nucleotide sequence of the WNT5B: i) genomic nucleic acid molecule, or the complement thereof, that is proximate to a position corresponding to position 58,170 according to SEQ ID NO:3, or the complement thereof; ii) mRNA molecule, or the complement thereof, that is proximate to a position corresponding to: position 491 according to SEQ ID NO:22, or the complement thereof; position 394 according to SEQ ID NO:23, or the complement thereof; position 447 according to SEQ ID NO:24, or the complement thereof; position 289 according to SEQ ID NO:25, or the complement thereof; position 394 according to SEQ ID NO:26, or the complement thereof; position 432 according to SEQ ID NO:27, or the complement thereof; position 792 according to SEQ ID NO:28, or the complement thereof; or position 254 according to SEQ ID NO:29, or the complement thereof; and/or iii) cDNA molecule, or the complement thereof, that is proximate to a position corresponding to: position 491 according to SEQ ID NO:65, or the complement thereof; position 394 according to SEQ ID NO:66, or the complement thereof; position 447 according to SEQ ID NO:67, or the complement thereof; position 289 according to SEQ ID NO:68, or the complement thereof; position 394 according to SEQ ID NO:69, or the complement thereof; position 432 according to SEQ ID NO:70, or the complement thereof; position 792 according to SEQ ID NO:71, or the complement thereof; or position 254 according to SEQ ID NO:72, or the complement thereof; b) extending the primer at least through the position of the nucleotide sequence of the WNT5B: i) genomic nucleic acid molecule, or the complement thereof, corresponding to position 58,170 according to SEQ ID NO:3, or the complement thereof; ii) mRNA molecule, or the complement thereof, corresponding to: position 491 according to SEQ ID NO:22, or the complement thereof; position 394 according to SEQ ID NO:23, or the complement thereof; position 447 according to SEQ ID NO:24, or the complement thereof; position 289 according to SEQ ID NO:25, or the complement thereof; position 394 according to SEQ ID NO:26, or the complement thereof; position 432 according to SEQ ID NO:27, or the complement thereof; position 792 according to SEQ ID NO:28, or the complement thereof; or position 254 according to SEQ ID NO:29, or the complement thereof; and/or iii) cDNA molecule, or the complement thereof, corresponding to: position 491 according to SEQ ID NO:65, or the complement thereof; position 394 according to SEQ ID NO:66, or the complement thereof; position 447 according to SEQ ID NO:67, or the complement thereof; position 289 according to SEQ ID NO:68, or the complement thereof; position 394 according to SEQ ID NO:69, or the complement thereof; position 432 according to SEQ ID NO:70, or the complement thereof; position 792 according to SEQ ID NO:71, or the complement thereof; or position 254 according to SEQ ID NO:72, or the complement thereof; and c) determining whether the extension product of the primer comprises: an adenine at a position corresponding to position 58,170 according to SEQ ID NO:3, or the complement thereof; an adenine at a position corresponding to position 491 according to SEQ ID NO:22, or the complement thereof; an adenine at a position corresponding to position 394 according to SEQ ID NO:23, or the complement thereof; an adenine at a position corresponding to position 447 according to SEQ ID NO:24, or the complement thereof; an adenine at a position corresponding to position 289 according to SEQ ID NO:25, or the complement thereof; an adenine at a position corresponding to position 394 according to SEQ ID NO:26, or the complement thereof; an adenine at a position corresponding to position 432 according to SEQ ID NO:27, or the complement thereof; an adenine at a position corresponding to position 792 according to SEQ ID NO:28, or the complement thereof; an adenine at a position corresponding to position 254 according to SEQ ID NO:29, or the complement thereof; an adenine at a position corresponding to position 491 according to SEQ ID NO:65, or the complement thereof; an adenine at a position corresponding to position 394 according to SEQ ID NO:66, or the complement thereof; an adenine at a position corresponding to position 447 according to SEQ ID NO:67, or the complement thereof; an adenine at a position corresponding to position 289 according to SEQ ID NO:68, or the complement thereof; an adenine at a position corresponding to position 394 according to SEQ ID NO:69, or the complement thereof; an adenine at a position corresponding to position 432 according to SEQ ID NO:70, or the complement thereof; an adenine at a position corresponding to position 792 according to SEQ ID NO:71, or the complement thereof; or an adenine at a position corresponding to position 254 according to SEQ ID NO:72, or the complement thereof.

[0118] In some embodiments, the determining step, detecting step, or sequence analysis comprises: a) contacting the biological sample with a primer hybridizing to a portion of the nucleotide sequence of the WNT5B: i) genomic nucleic acid molecule, or the complement thereof, that is proximate to a position corresponding to position 65,099 according to SEQ ID NO:4, or the complement thereof; ii) mRNA molecule, or the complement thereof, that is proximate to a position corresponding to: position 642 according to SEQ ID NO:30, or the complement thereof; position 545 according to SEQ ID NO:31, or the complement thereof; position 598 according to SEQ ID NO:32, or the complement thereof; position 545 according to SEQ ID NO:33, or the complement thereof; position 583 according to SEQ ID NO:34, or the complement thereof; position 943 according to SEQ ID NO:35, or the complement thereof; or position 405 according to SEQ ID NO:36, or the complement thereof; and/or iii) cDNA molecule, or the complement thereof, that is proximate to a position corresponding to: position 642 according to SEQ ID NO:73, or the complement thereof; position 545 according to SEQ ID NO:74, or the complement thereof; position 598 according to SEQ ID NO:75, or the complement thereof; position 545 according to SEQ ID NO:76, or the complement thereof; position 583 according to SEQ ID NO:77, or the complement thereof; position 943 according to SEQ ID NO:78, or the complement thereof; or position 405 according to SEQ ID NO:79, the complement thereof; b) extending the primer at least through the position of the nucleotide sequence of the WNT5B: i) genomic nucleic acid molecule, or the complement thereof, corresponding to position 65,099 according to SEQ ID NO:4, or the complement thereof; ii) mRNA molecule, or the complement thereof, corresponding to: position 642 according to SEQ ID NO:30, or the complement thereof; position 545 according to SEQ ID NO:31, or the complement thereof; position 598 according to SEQ ID NO:32, or the complement thereof; position 545 according to SEQ ID NO:33, or the complement thereof; position 583 according to SEQ ID NO:34, or the complement thereof; position 943 according to SEQ ID NO:35, or the complement thereof; or position 405 according to SEQ ID NO:36, the complement thereof; and/or iii) cDNA molecule, or the complement thereof, corresponding to: position 642 according to SEQ ID NO:73, or the complement thereof; position 545 according to SEQ ID NO:74, or the complement thereof; position 598 according to SEQ ID NO:75, or the complement thereof; position 545 according to SEQ ID NO:76, or the complement thereof; position 583 according to SEQ ID NO:77, or the complement thereof; position 943 according to SEQ ID NO:78, or the complement thereof; or position 405 according to SEQ ID NO:79, the complement thereof; and c) determining whether the extension product of the primer comprises: a thymine at a position corresponding to position 65,099 according to SEQ ID NO:4, or the complement thereof; a uracil at a position corresponding to position 642 according to SEQ ID NO:30, or the complement thereof; a uracil at a position corresponding to position 545 according to SEQ ID NO:31, or the complement thereof; a uracil at a position corresponding to position 598 according to SEQ ID NO:32, or the complement thereof; a uracil at a position corresponding to position 545 according to SEQ ID NO:33, or the complement thereof; a uracil at a position corresponding to position 583 according to SEQ ID NO:34, or the complement thereof; a uracil at a position corresponding to position 943 according to SEQ ID NO:35, or the complement thereof; a uracil at a position corresponding to position 405 according to SEQ ID NO:36, or the complement thereof; a thymine at a position corresponding to position 642 according to SEQ ID NO:73, or the complement thereof; a thymine at a position corresponding to position 545 according to SEQ ID NO:74, or the complement thereof; a thymine at a position corresponding to position 598 according to SEQ ID NO:75, or the complement thereof; a thymine at a position corresponding to position 545 according to SEQ ID NO:76, or the complement thereof; a thymine at a position corresponding to position 583 according to SEQ ID NO:77, or the complement thereof; a thymine at a position corresponding to position 943 according to SEQ ID NO:78, or the complement thereof; or a thymine at a position corresponding to position 405 according to SEQ ID NO:79, or the complement thereof.

[0119] In some embodiments, the determining step, detecting step, or sequence analysis comprises: a) contacting the biological sample with a primer hybridizing to a portion of the nucleotide sequence of the WNT5B: i) genomic nucleic acid molecule, or the complement thereof, that is proximate to a position corresponding to position 65,099 according to SEQ ID NO:5, or the complement thereof; ii) mRNA molecule, or the complement thereof, that is proximate to a position corresponding to: position 642 according to SEQ ID NO:37, or the complement thereof; position 545 according to SEQ ID NO:38, or the complement thereof; position 598 according to SEQ ID NO:39, or the complement thereof; position 545 according to SEQ ID NO:40, or the complement thereof; position 583 according to SEQ ID NO:41, or the complement thereof; position 943 according to SEQ ID NO:42, or the complement thereof; or position 405 according to SEQ ID NO:43, the complement thereof; and/or iii) cDNA molecule, or the complement thereof, that is proximate to a position corresponding to: position 642 according to SEQ ID NO:80, or the complement thereof; position 545 according to SEQ ID NO:81, or the complement thereof; position 598 according to SEQ ID NO:82, or the complement thereof; position 545 according to SEQ ID NO:83, the complement thereof; position 583 according to SEQ ID NO:84, or the complement thereof; position 943 according to SEQ ID NO:85, or the complement thereof; or position 405 according to SEQ ID NO:86, or the complement thereof; b) extending the primer at least through the position of the nucleotide sequence of the WNT5B: i) genomic nucleic acid molecule, or the complement thereof, corresponding to position 65,099 according to SEQ ID NO:5, or the complement thereof; ii) mRNA molecule, or the complement thereof, corresponding to: position 642 according to SEQ ID NO:37, or the complement thereof; position 545 according to SEQ ID NO:38, or the complement thereof; position 598 according to SEQ ID NO:39, or the complement thereof; position 545 according to SEQ ID NO:40, or the complement thereof; position 583 according to SEQ ID NO:41, or the complement thereof; position 943 according to SEQ ID NO:42, or the complement thereof; or position 405 according to SEQ ID NO:43, or the complement thereof; and/or iii) cDNA molecule, or the complement thereof, corresponding to: position 642 according to SEQ ID NO:80, or the complement thereof; position 545 according to SEQ ID NO:81, or the complement thereof; position 598 according to SEQ ID NO:82, or the complement thereof; position 545 according to SEQ ID NO:83, or the complement thereof; position 583 according to SEQ ID NO:84, or the complement thereof; position 943 according to SEQ ID NO:85, the complement thereof; or position 405 according to SEQ ID NO:86, or the complement thereof; and c) determining whether the extension product of the primer comprises: an adenine at a position corresponding to position 65,099 according to SEQ ID NO:5, or the complement thereof; an adenine at a position corresponding to position 642 according to SEQ ID NO:37, or the complement thereof; an adenine at a position corresponding to position 545 according to SEQ ID NO:38, or the complement thereof; an adenine at a position corresponding to position 598 according to SEQ ID NO:39, or the complement thereof; an adenine at a position corresponding to position 545 according to SEQ ID NO:40, or the complement thereof; an adenine at a position corresponding to position 583 according to SEQ ID NO:41, or the complement thereof; an adenine at a position corresponding to position 943 according to SEQ ID NO:42, or the complement thereof; an adenine at a position corresponding to position 405 according to SEQ ID NO:43, or the complement thereof; an adenine at a position corresponding to position 642 according to SEQ ID NO:80, or the complement thereof; an adenine at a position corresponding to position 545 according to SEQ ID NO:81, or the complement thereof; an adenine at a position corresponding to position 598 according to SEQ ID NO:82, or the complement thereof; an adenine at a position corresponding to position 545 according to SEQ ID NO:83, or the complement thereof; an adenine at a position corresponding to position 583 according to SEQ ID NO:84, or the complement thereof; an adenine at a position corresponding to position 943 according to SEQ ID NO:85, or the complement thereof; or an adenine at a position corresponding to position 405 according to SEQ ID NO:86, the complement thereof.

[0120] In some embodiments, the determining step, detecting step, or sequence analysis comprises: a) contacting the biological sample with a primer hybridizing to a portion of the nucleotide sequence of the WNT5B: i) genomic nucleic acid molecule, or the complement thereof, that is proximate to positions corresponding to positions 71,313-71,314 according to SEQ ID NO:6, or the complement thereof; ii) mRNA molecule, or the complement thereof, that is proximate to a position corresponding to: positions 1,039-1,040 according to SEQ ID NO:44, or the complement thereof; positions 942-943 according to SEQ ID NO:45, or the complement thereof; positions 995-996 according to SEQ ID NO:46, or the complement thereof; positions 942-943 according to SEQ ID NO:47, or the complement thereof; or positions 980-981 according to SEQ ID NO:48, or the complement thereof; and/or iii) cDNA molecule, or the complement thereof, that is proximate to a position corresponding to: positions 1,039-1,040 according to SEQ ID NO:87, or the complement thereof; positions 942-943 according to SEQ ID NO:88, or the complement thereof; positions 995-996 according to SEQ ID NO:89, or the complement thereof; positions 942-943 according to SEQ ID NO:90, or the complement thereof; positions 980-981 according to SEQ ID NO:91, or the complement thereof; or positions 802-803 according to SEQ ID NO:92, or the complement thereof; b) extending the primer at least through the position of the nucleotide sequence of the WNT5B: i) genomic nucleic acid molecule, or the complement thereof, corresponding to positions 71,313-71,314 according to SEQ ID NO:6, or the complement thereof; ii) mRNA molecule, or the complement thereof, corresponding to: positions 1,039-1,040 according to SEQ ID NO:44, or the complement thereof; positions 942-943 according to SEQ ID NO:45, or the complement thereof; positions 995-996 according to SEQ ID NO:46, or the complement thereof; positions 942-943 according to SEQ ID NO:47, or the complement thereof; positions 980-981 according to SEQ ID NO:48, or the complement thereof; or positions 802-803 according to SEQ ID NO:49, or the complement thereof; and/iii) cDNA molecule, or the complement thereof, corresponding to: positions 1,039-1,040 according to SEQ ID NO:87, or the complement thereof; positions 942-943 according to SEQ ID NO:88, or the complement thereof; positions 995-996 according to SEQ ID NO:89, or the complement thereof; positions 942-943 according to SEQ ID NO:90, or the complement thereof; positions 980-981 according to SEQ ID NO:91, or the complement thereof; or positions 802-803 according to SEQ ID NO:92, or the complement thereof; and c) determining whether the extension product of the primer comprises: a deletion of a TC dinucleotide at positions corresponding to positions 71,313-71,314 according to SEQ ID NO:6, or the complement thereof; a deletion of a UC dinucleotide at positions corresponding to positions 1,039-1,040 according to SEQ ID NO:44, or the complement thereof; a deletion of a UC dinucleotide at positions corresponding to positions 942-943 according to SEQ ID NO:45, or the complement thereof; a deletion of a UC dinucleotide at positions corresponding to positions 995-996 according to SEQ ID NO:46, or the complement thereof; a deletion of a UC dinucleotide at positions corresponding to positions 942-943 according to SEQ ID NO:47, or the complement thereof; a deletion of a UC dinucleotide at positions corresponding to positions 980-981 according to SEQ ID NO:48, or the complement thereof; a deletion of a UC dinucleotide at positions corresponding to positions 802-803 according to SEQ ID NO:49, or the complement thereof; a deletion of a TC dinucleotide at positions corresponding to positions 1,039-1,040 according to SEQ ID NO:87, or the complement thereof; a deletion of a TC dinucleotide at positions corresponding to positions 942-943 according to SEQ ID NO:88, or the complement thereof; a deletion of a TC dinucleotide at positions corresponding to positions 995-996 according to SEQ ID NO:89, or the complement thereof; a deletion of a TC dinucleotide at positions corresponding to positions 942-943 according to SEQ ID NO:90, or the complement thereof; a deletion of a TC dinucleotide at positions corresponding to positions 980-981 according to SEQ ID NO:91, or the complement thereof; or a deletion of a TC dinucleotide at positions corresponding to positions 802-803 according to SEQ ID NO:92, or the complement thereof.

[0121] In some embodiments, the determining step, detecting step, or sequence analysis comprises: a) contacting the biological sample with a primer hybridizing to a portion of the nucleotide sequence of the WNT5B genomic nucleic acid molecule, or the complement thereof, that is proximate to a position corresponding to: position 56,698 according to SEQ ID NO:2, or the complement thereof; position 58,170 according to SEQ ID NO:3, or the complement thereof; position 65,099 according to SEQ ID NO:4, or the complement thereof; position 65,099 according to SEQ ID NO:5, or the complement thereof; or positions 71,313-71,314 according to SEQ ID NO:6, or the complement thereof; b) extending the primer at least through the position of the nucleotide sequence of the WNT5B genomic nucleic acid molecule, or the complement thereof, corresponding to: position 56,698 according to SEQ ID NO:2, or the complement thereof; position 58,170 according to SEQ ID NO:3, or the complement thereof; position 65,099 according to SEQ ID NO:4, or the complement thereof; position 65,099 according to SEQ ID NO:5, or the complement thereof; or positions 71,313-71,314 according to SEQ ID NO:6, or the complement thereof; and c) determining whether the extension product of the primer comprises: a thymine at a position corresponding to position 56,698 according to SEQ ID NO:2, or the complement thereof; an adenine at a position corresponding to position 58,170 according to SEQ ID NO:3, or the complement thereof; a thymine at a position corresponding to position 65,099 according to SEQ ID NO:4, or the complement thereof; an adenine at a position corresponding to position 65,099 according to SEQ ID NO:5, or the complement thereof; or a deletion of a TC dinucleotide at positions corresponding to positions 71,313-71,314 according to SEQ ID NO:6, or the complement thereof.

[0122] In some embodiments, the determining step, detecting step, or sequence analysis comprises: a) contacting the biological sample with a primer hybridizing to a portion of the nucleotide sequence of the WNT5B mRNA molecule, or the complement thereof, that is proximate to a position corresponding to: position 242 according to SEQ ID NO:15, or the complement thereof; position 145 according to SEQ ID NO:16, or the complement thereof; position 198 according to SEQ ID NO:17, or the complement thereof; position 40 according to SEQ ID NO:18, or the complement thereof; position 145 according to SEQ ID NO:19, or the complement thereof; position 183 according to SEQ ID NO:20, or the complement thereof; position 543 according to SEQ ID NO:21, or the complement thereof; position 491 according to SEQ ID NO:22, or the complement thereof; position 394 according to SEQ ID NO:23, or the complement thereof; position 447 according to SEQ ID NO:24, or the complement thereof; position 289 according to SEQ ID NO:25, or the complement thereof; position 394 according to SEQ ID NO:26, or the complement thereof; position 432 according to SEQ ID NO:27, or the complement thereof; position 792 according to SEQ ID NO:28, or the complement thereof; position 254 according to SEQ ID NO:29, or the complement thereof; position 642 according to SEQ ID NO:30, or the complement thereof; position 545 according to SEQ ID NO:31, or the complement thereof; position 598 according to SEQ ID NO:32, or the complement thereof; position 545 according to SEQ ID NO:33, or the complement thereof; position 583 according to SEQ ID NO:34, or the complement thereof; position 943 according to SEQ ID NO:35, or the complement thereof; position 405 according to SEQ ID NO:36, or the complement thereof; position 642 according to SEQ ID NO:37, or the complement thereof; position 545 according to SEQ ID NO:38, or the complement thereof; position 598 according to SEQ ID NO:39, or the complement thereof; position 545 according to SEQ ID NO:40, or the complement thereof; position 583 according to SEQ ID NO:41, or the complement thereof; position 943 according to SEQ ID NO:42, or the complement thereof; position 405 according to SEQ ID NO:43, or the complement thereof; positions 1,039-1,040 according to SEQ ID NO:44, or the complement thereof; positions 942-943 according to SEQ ID NO:45, or the complement thereof; positions 995-996 according to SEQ ID NO:46, or the complement thereof; positions 942-943 according to SEQ ID NO:47, or the complement thereof; positions 980-981 according to SEQ ID NO:48, or the complement thereof; or positions 802-803 according to SEQ ID NO:49, or the complement thereof; b) extending the primer at least through the position of the nucleotide sequence of the WNT5B mRNA molecule corresponding to: position 242 according to SEQ ID NO:15, or the complement thereof; position 145 according to SEQ ID NO:16, or the complement thereof; position 198 according to SEQ ID NO:17, or the complement thereof; position 40 according to SEQ ID NO:18, or the complement thereof; position 145 according to SEQ ID NO:19, or the complement thereof; position 183 according to SEQ ID NO:20, or the complement thereof; position 543 according to SEQ ID NO:21, or the complement thereof; position 491 according to SEQ ID NO:22, or the complement thereof; position 394 according to SEQ ID NO:23, or the complement thereof; position 447 according to SEQ ID NO:24, or the complement thereof; position 289 according to SEQ ID NO:25, or the complement thereof; position 394 according to SEQ ID NO:26, or the complement thereof; position 432 according to SEQ ID NO:27, or the complement thereof; position 792 according to SEQ ID NO:28, or the complement thereof; position 254 according to SEQ ID NO:29, or the complement thereof; position 642 according to SEQ ID NO:30, or the complement thereof; position 545 according to SEQ ID NO:31, or the complement thereof; position 598 according to SEQ ID NO:32, or the complement thereof; position 545 according to SEQ ID NO:33, or the complement thereof; position 583 according to SEQ ID NO:34, or the complement thereof; position 943 according to SEQ ID NO:35, or the complement thereof; position 405 according to SEQ ID NO:36, or the complement thereof; position 642 according to SEQ ID NO:37, or the complement thereof; position 545 according to SEQ ID NO:38, or the complement thereof; position 598 according to SEQ ID NO:39, or the complement thereof; position 545 according to SEQ ID NO:40, or the complement thereof; position 583 according to SEQ ID NO:41, or the complement thereof; position 943 according to SEQ ID NO:42, or the complement thereof; position 405 according to SEQ ID NO:43, or the complement thereof; positions 1,039-1,040 according to SEQ ID NO:44, or the complement thereof; positions 942-943 according to SEQ ID NO:45, or the complement thereof; positions 995-996 according to SEQ ID NO:46, or the complement thereof; positions 942-943 according to SEQ ID NO:47, or the complement thereof; positions 980-981 according to SEQ ID NO:48, or the complement thereof; or positions 802-803 according to SEQ ID NO:49, or the complement thereof; and c) determining whether the extension product of the primer comprises: a uracil at a position corresponding to position 242 according to SEQ ID NO:15, or the complement thereof; a uracil at a position corresponding to position 145 according to SEQ ID NO:16, or the complement thereof; a uracil at a position corresponding to position 198 according to SEQ ID NO:17, or the complement thereof; a uracil at a position corresponding to position 40 according to SEQ ID NO:18, or the complement thereof; a uracil at a position corresponding to position 145 according to SEQ ID NO:19, or the complement thereof; a uracil at a position corresponding to position 183 according to SEQ ID NO:20, or the complement thereof; a uracil at a position corresponding to position 543 according to SEQ ID NO:21, or the complement thereof; an adenine at a position corresponding to position 491 according to SEQ ID NO:22, or the complement thereof; an adenine at a position corresponding to position 394 according to SEQ ID NO:23, or the complement thereof; an adenine at a position corresponding to position 447 according to SEQ ID NO:24, or the complement thereof; an adenine at a position corresponding to position 289 according to SEQ ID NO:25, or the complement thereof; an adenine at a position corresponding to position 394 according to SEQ ID NO:26, or the complement thereof; an adenine at a position corresponding to position 432 according to SEQ ID NO:27, or the complement thereof; an adenine at a position corresponding to position 792 according to SEQ ID NO:28, or the complement thereof; an adenine at a position corresponding to position 254 according to SEQ ID NO:29, or the complement thereof; a uracil at a position corresponding to position 642 according to SEQ ID NO:30, or the complement thereof; a uracil at a position corresponding to position 545 according to SEQ ID NO:31, or the complement thereof; a uracil at a position corresponding to position 598 according to SEQ ID NO:32, or the complement thereof; a uracil at a position corresponding to position 545 according to SEQ ID NO:33, or the complement thereof; a uracil at a position corresponding to position 583 according to SEQ ID NO:34, or the complement thereof; a uracil at a position corresponding to position 943 according to SEQ ID NO:35, or the complement thereof; a uracil at a position corresponding to position 405 according to SEQ ID NO:36, or the complement thereof; an adenine at a position corresponding to position 642 according to SEQ ID NO:37, or the complement thereof; an adenine at a position corresponding to position 545 according to SEQ ID NO:38, or the complement thereof; an adenine at a position corresponding to position 598 according to SEQ ID NO:39, or the complement thereof; an adenine at a position corresponding to position 545 according to SEQ ID NO:40, or the complement thereof; an adenine at a position corresponding to position 583 according to SEQ ID NO:41, or the complement thereof; an adenine at a position corresponding to position 943 according to SEQ ID NO:42, or the complement thereof; an adenine at a position corresponding to position 405 according to SEQ ID NO:43, or the complement thereof; a deletion of a UC dinucleotide at positions corresponding to positions 1,039-1,040 according to SEQ ID NO:44, or the complement thereof; a deletion of a UC dinucleotide at positions corresponding to positions 942-943 according to SEQ ID NO:45, or the complement thereof; a deletion of a UC dinucleotide at positions corresponding to positions 995-996 according to SEQ ID NO:46, or the complement thereof; a deletion of a UC dinucleotide at positions corresponding to positions 942-943 according to SEQ ID NO:47, or the complement thereof; a deletion of a UC dinucleotide at positions corresponding to positions 980-981 according to SEQ ID NO:48, or the complement thereof; or a deletion of a UC dinucleotide at positions corresponding to positions 802-803 according to SEQ ID NO:49, or the complement thereof.

[0123] In some embodiments, the determining step, detecting step, or sequence analysis comprises: a) contacting the biological sample with a primer hybridizing to a portion of the nucleotide sequence of the WNT5B cDNA molecule, or the complement thereof, that is proximate to a position corresponding to: position 242 according to SEQ ID NO:58, or the complement thereof; position 145 according to SEQ ID NO:59, or the complement thereof; position 198 according to SEQ ID NO:60, or the complement thereof; position 40 according to SEQ ID NO:61, or the complement thereof; position 145 according to SEQ ID NO:62, or the complement thereof; position 183 according to SEQ ID NO:63, or the complement thereof; position 543 according to SEQ ID NO:64, or the complement thereof; position 491 according to SEQ ID NO:65, or the complement thereof; position 394 according to SEQ ID NO:66, or the complement thereof; position 447 according to SEQ ID NO:67, or the complement thereof; position 289 according to SEQ ID NO:68, or the complement thereof; position 394 according to SEQ ID NO:69, or the complement thereof; position 432 according to SEQ ID NO:70, or the complement thereof; position 792 according to SEQ ID NO:71, or the complement thereof; position 254 according to SEQ ID NO:72, or the complement thereof; position 642 according to SEQ ID NO:73, or the complement thereof; position 545 according to SEQ ID NO:74, or the complement thereof; position 598 according to SEQ ID NO:75, or the complement thereof; position 545 according to SEQ ID NO:76, or the complement thereof; position 583 according to SEQ ID NO:77, or the complement thereof; position 943 according to SEQ ID NO:78, or the complement thereof; position 405 according to SEQ ID NO:79, or the complement thereof; position 642 according to SEQ ID NO:80, or the complement thereof; position 545 according to SEQ ID NO:81, or the complement thereof; position 598 according to SEQ ID NO:82, or the complement thereof; position 545 according to SEQ ID NO:83, or the complement thereof; position 583 according to SEQ ID NO:84, or the complement thereof; position 943 according to SEQ ID NO:85, or the complement thereof; position 405 according to SEQ ID NO:86, or the complement thereof; positions 1,039-1,040 according to SEQ ID NO:87, or the complement thereof; positions 942-943 according to SEQ ID NO:88, or the complement thereof; positions 995-996 according to SEQ ID NO:89, or the complement thereof; positions 942-943 according to SEQ ID NO:90, or the complement thereof; positions 980-981 according to SEQ ID NO:91, or the complement thereof; or positions 802-803 according to SEQ ID NO:92, or the complement thereof; b) extending the primer at least through the position of the nucleotide sequence of the WNT5B cDNA molecule corresponding to: position 242 according to SEQ ID NO:58, or the complement thereof; position 145 according to SEQ ID NO:59, or the complement thereof; position 198 according to SEQ ID NO:60, or the complement thereof; position 40 according to SEQ ID NO:61, or the complement thereof; position 145 according to SEQ ID NO:62, or the complement thereof; position 183 according to SEQ ID NO:63, or the complement thereof; position 543 according to SEQ ID NO:64, or the complement thereof; position 491 according to SEQ ID NO:65, or the complement thereof; position 394 according to SEQ ID NO:66, or the complement thereof; position 447 according to SEQ ID NO:67, or the complement thereof; position 289 according to SEQ ID NO:68, or the complement thereof; position 394 according to SEQ ID NO:69, or the complement thereof; position 432 according to SEQ ID NO:70, or the complement thereof; position 792 according to SEQ ID NO:71, or the complement thereof; position 254 according to SEQ ID NO:72, or the complement thereof; position 642 according to SEQ ID NO:73, or the complement thereof; position 545 according to SEQ ID NO:74, or the complement thereof; position 598 according to SEQ ID NO:75, or the complement thereof; position 545 according to SEQ ID NO:76, or the complement thereof; position 583 according to SEQ ID NO:77, or the complement thereof; position 943 according to SEQ ID NO:78, or the complement thereof; position 405 according to SEQ ID NO:79, or the complement thereof; position 642 according to SEQ ID NO:80, or the complement thereof; position 545 according to SEQ ID NO:81, or the complement thereof; position 598 according to SEQ ID NO:82, or the complement thereof; position 545 according to SEQ ID NO:83, or the complement thereof; position 583 according to SEQ ID NO:84, or the complement thereof; position 943 according to SEQ ID NO:85, or the complement thereof; position 405 according to SEQ ID NO:86, or the complement thereof; positions 1,039-1,040 according to SEQ ID NO:87, or the complement thereof; positions 942-943 according to SEQ ID NO:88, or the complement thereof; positions 995-996 according to SEQ ID NO:89, or the complement thereof; positions 942-943 according to SEQ ID NO:90, or the complement thereof; positions 980-981 according to SEQ ID NO:91, or the complement thereof; or positions 802-803 according to SEQ ID NO:92, the complement thereof; and c) determining whether the extension product of the primer comprises: a thymine at a position corresponding to position 242 according to SEQ ID NO:58, or the complement thereof; a thymine at a position corresponding to position 145 according to SEQ ID NO:59, or the complement thereof; a thymine at a position corresponding to position 198 according to SEQ ID NO:60, or the complement thereof; a thymine at a position corresponding to position 40 according to SEQ ID NO:61, or the complement thereof; a thymine at a position corresponding to position 145 according to SEQ ID NO:62, or the complement thereof; a thymine at a position corresponding to position 183 according to SEQ ID NO:63, or the complement thereof; a thymine at a position corresponding to position 543 according to SEQ ID NO:64, or the complement thereof; an adenine at a position corresponding to position 491 according to SEQ ID NO:65, or the complement thereof; an adenine at a position corresponding to position 394 according to SEQ ID NO:66, or the complement thereof; an adenine at a position corresponding to position 447 according to SEQ ID NO:67, or the complement thereof; an adenine at a position corresponding to position 289 according to SEQ ID NO:68, or the complement thereof; an adenine at a position corresponding to position 394 according to SEQ ID NO:69, or the complement thereof; an adenine at a position corresponding to position 432 according to SEQ ID NO:70, or the complement thereof; an adenine at a position corresponding to position 792 according to SEQ ID NO:71, or the complement thereof; an adenine at a position corresponding to position 254 according to SEQ ID NO:72, or the complement thereof; a thymine at a position corresponding to position 642 according to SEQ ID NO:73, or the complement thereof; a thymine at a position corresponding to position 545 according to SEQ ID NO:74, or the complement thereof; a thymine at a position corresponding to position 598 according to SEQ ID NO:75, or the complement thereof; a thymine at a position corresponding to position 545 according to SEQ ID NO:76, or the complement thereof; a thymine at a position corresponding to position 583 according to SEQ ID NO:77, or the complement thereof; a thymine at a position corresponding to position 943 according to SEQ ID NO:78, or the complement thereof; a thymine at a position corresponding to position 405 according to SEQ ID NO:79, or the complement thereof; an adenine at a position corresponding to position 642 according to SEQ ID NO:80, or the complement thereof; an adenine at a position corresponding to position 545 according to SEQ ID NO:81, or the complement thereof; an adenine at a position corresponding to position 598 according to SEQ ID NO:82, or the complement thereof; an adenine at a position corresponding to position 545 according to SEQ ID NO:83, or the complement thereof; an adenine at a position corresponding to position 583 according to SEQ ID NO:84, or the complement thereof; an adenine at a position corresponding to position 943 according to SEQ ID NO:85, or the complement thereof; an adenine at a position corresponding to position 405 according to SEQ ID NO:86, or the complement thereof; a deletion of a TC dinucleotide at positions corresponding to positions 1,039-1,040 according to SEQ ID NO:87, or the complement thereof; a deletion of a TC dinucleotide at positions corresponding to positions 942-943 according to SEQ ID NO:88, or the complement thereof; a deletion of a TC dinucleotide at positions corresponding to positions 995-996 according to SEQ ID NO:89, or the complement thereof; a deletion of a TC dinucleotide at positions corresponding to positions 942-943 according to SEQ ID NO:90, or the complement thereof; a deletion of a TC dinucleotide at positions corresponding to positions 980-981 according to SEQ ID NO:91, or the complement thereof; or a deletion of a TC dinucleotide at positions corresponding to positions 802-803 according to SEQ ID NO:92, or the complement thereof.

[0124] In some embodiments, the entire nucleic acid molecule is sequenced. In some embodiments, only a WNT5B genomic nucleic acid molecule is analyzed. In some embodiments, only a WNT5B mRNA is analyzed. In some embodiments, only a WNT5B cDNA obtained from WNT5B mRNA is analyzed.

[0125] In some embodiments, the determining step, detecting step, or sequence analysis comprises: a) amplifying at least a portion of the WNT5B nucleic acid molecule, or the complement thereof, in the biological sample, wherein the amplified portion comprises: a thymine at a position corresponding to position 56,698 according to SEQ ID NO:2, or the complement thereof; a uracil at a position corresponding to position 242 according to SEQ ID NO:15, or the complement thereof; a uracil at a position corresponding to position 145 according to SEQ ID NO:16, or the complement thereof; a uracil at a position corresponding to position 198 according to SEQ ID NO:17, or the complement thereof; a uracil at a position corresponding to position 40 according to SEQ ID NO:18, or the complement thereof; a uracil at a position corresponding to position 145 according to SEQ ID NO:19, or the complement thereof; a uracil at a position corresponding to position 183 according to SEQ ID NO:20, or the complement thereof; a uracil at a position corresponding to position 543 according to SEQ ID NO:21, or the complement thereof; a thymine at a position corresponding to position 242 according to SEQ ID NO:58, or the complement thereof; a thymine at a position corresponding to position 145 according to SEQ ID NO:59, or the complement thereof; a thymine at a position corresponding to position 198 according to SEQ ID NO:60, or the complement thereof; a thymine at a position corresponding to position 40 according to SEQ ID NO:61, or the complement thereof; a thymine at a position corresponding to position 145 according to SEQ ID NO:62, or the complement thereof; or a thymine at a position corresponding to position 183 according to SEQ ID NO:63, or the complement thereof; a thymine at a position corresponding to position 543 according to SEQ ID NO:64, or the complement thereof; b) labeling the amplified nucleic acid molecule with a detectable label; c) contacting the labeled nucleic acid molecule with a support comprising an alteration-specific probe, wherein the alteration-specific probe comprises a nucleotide sequence which hybridizes under stringent conditions to the nucleic acid sequence of the amplified nucleic acid molecule comprising: a thymine at a position corresponding to position 56,698 according to SEQ ID NO:2, or the complement thereof; a uracil at a position corresponding to position 242 according to SEQ ID NO:15, or the complement thereof; a uracil at a position corresponding to position 145 according to SEQ ID NO:16, or the complement thereof; a uracil at a position corresponding to position 198 according to SEQ ID NO:17, or the complement thereof; a uracil at a position corresponding to position 40 according to SEQ ID NO:18, or the complement thereof; a uracil at a position corresponding to position 145 according to SEQ ID NO:19, or the complement thereof; a uracil at a position corresponding to position 183 according to SEQ ID NO:20, or the complement thereof; a uracil at a position corresponding to position 543 according to SEQ ID NO:21, or the complement thereof; a thymine at a position corresponding to position 242 according to SEQ ID NO:58, or the complement thereof; a thymine at a position corresponding to position 145 according to SEQ ID NO:59, or the complement thereof; a thymine at a position corresponding to position 198 according to SEQ ID NO:60, or the complement thereof; a thymine at a position corresponding to position 40 according to SEQ ID NO:61, or the complement thereof; a thymine at a position corresponding to position 145 according to SEQ ID NO:62, or the complement thereof; a thymine at a position corresponding to position 183 according to SEQ ID NO:63, or the complement thereof; or a thymine at a position corresponding to position 543 according to SEQ ID NO:64, or the complement thereof; and d) detecting the detectable label.

[0126] In some embodiments, the determining step, detecting step, or sequence analysis comprises: a) amplifying at least a portion of the WNT5B nucleic acid molecule, or the complement thereof, in the biological sample, wherein the amplified portion comprises: an adenine at a position corresponding to position 58,170 according to SEQ ID NO:3, or the complement thereof; an adenine at a position corresponding to position 491 according to SEQ ID NO:22, or the complement thereof; an adenine at a position corresponding to position 394 according to SEQ ID NO:23, or the complement thereof; an adenine at a position corresponding to position 447 according to SEQ ID NO:24, or the complement thereof; an adenine at a position corresponding to position 289 according to SEQ ID NO:25, or the complement thereof; an adenine at a position corresponding to position 394 according to SEQ ID NO:26, or the complement thereof; an adenine at a position corresponding to position 432 according to SEQ ID NO:27, or the complement thereof; an adenine at a position corresponding to position 792 according to SEQ ID NO:28, or the complement thereof; an adenine at a position corresponding to position 254 according to SEQ ID NO:29, or the complement thereof; an adenine at a position corresponding to position 491 according to SEQ ID NO:65, or the complement thereof; an adenine at a position corresponding to position 394 according to SEQ ID NO:66, or the complement thereof; an adenine at a position corresponding to position 447 according to SEQ ID NO:67, or the complement thereof; an adenine at a position corresponding to position 289 according to SEQ ID NO:68, or the complement thereof; an adenine at a position corresponding to position 394 according to SEQ ID NO:69, or the complement thereof; an adenine at a position corresponding to position 432 according to SEQ ID NO:70, or the complement thereof; an adenine at a position corresponding to position 792 according to SEQ ID NO:71, or the complement thereof; or an adenine at a position corresponding to position 254 according to SEQ ID NO:72, or the complement thereof; b) labeling the amplified nucleic acid molecule with a detectable label; c) contacting the labeled nucleic acid molecule with a support comprising an alteration-specific probe, wherein the alteration-specific probe comprises a nucleotide sequence which hybridizes under stringent conditions to the nucleic acid sequence of the amplified nucleic acid molecule comprising: an adenine at a position corresponding to position 58,170 according to SEQ ID NO:3, or the complement thereof; an adenine at a position corresponding to position 491 according to SEQ ID NO:22, or the complement thereof; an adenine at a position corresponding to position 394 according to SEQ ID NO:23, or the complement thereof; an adenine at a position corresponding to position 447 according to SEQ ID NO:24, or the complement thereof; an adenine at a position corresponding to position 289 according to SEQ ID NO:25, or the complement thereof; an adenine at a position corresponding to position 394 according to SEQ ID NO:26, or the complement thereof; an adenine at a position corresponding to position 432 according to SEQ ID NO:27, or the complement thereof; an adenine at a position corresponding to position 792 according to SEQ ID NO:28, or the complement thereof; an adenine at a position corresponding to position 254 according to SEQ ID NO:29, or the complement thereof; an adenine at a position corresponding to position 491 according to SEQ ID NO:65, or the complement thereof; an adenine at a position corresponding to position 394 according to SEQ ID NO:66, or the complement thereof; an adenine at a position corresponding to position 447 according to SEQ ID NO:67, or the complement thereof; an adenine at a position corresponding to position 289 according to SEQ ID NO:68, or the complement thereof; an adenine at a position corresponding to position 394 according to SEQ ID NO:69, or the complement thereof; an adenine at a position corresponding to position 432 according to SEQ ID NO:70, or the complement thereof; an adenine at a position corresponding to position 792 according to SEQ ID NO:71, or the complement thereof; or an adenine at a position corresponding to position 254 according to SEQ ID NO:72, or the complement thereof; and d) detecting the detectable label.

[0127] In some embodiments, the determining step, detecting step, or sequence analysis comprises: a) amplifying at least a portion of the WNT5B nucleic acid molecule, or the complement thereof, in the biological sample, wherein the amplified portion comprises: a thymine at a position corresponding to position 65,099 according to SEQ ID NO:4, or the complement thereof; a uracil at a position corresponding to position 642 according to SEQ ID NO:30, or the complement thereof; a uracil at a position corresponding to position 545 according to SEQ ID NO:31, or the complement thereof; a uracil at a position corresponding to position 598 according to SEQ ID NO:32, or the complement thereof; a uracil at a position corresponding to position 545 according to SEQ ID NO:33, or the complement thereof; a uracil at a position corresponding to position 583 according to SEQ ID NO:34, or the complement thereof; a uracil at a position corresponding to position 943 according to SEQ ID NO:35, or the complement thereof; a uracil at a position corresponding to position 405 according to SEQ ID NO:36, or the complement thereof; a thymine at a position corresponding to position 642 according to SEQ ID NO:73, or the complement thereof; a thymine at a position corresponding to position 545 according to SEQ ID NO:74, or the complement thereof; a thymine at a position corresponding to position 598 according to SEQ ID NO:75, or the complement thereof; a thymine at a position corresponding to position 545 according to SEQ ID NO:76, or the complement thereof; a thymine at a position corresponding to position 583 according to SEQ ID NO:77, or the complement thereof; a thymine at a position corresponding to position 943 according to SEQ ID NO:78, or the complement thereof; or a thymine at a position corresponding to position 405 according to SEQ ID NO:79, or the complement thereof; b) labeling the amplified nucleic acid molecule with a detectable label; c) contacting the labeled nucleic acid molecule with a support comprising an alteration-specific probe, wherein the alteration-specific probe comprises a nucleotide sequence which hybridizes under stringent conditions to the nucleic acid sequence of the amplified nucleic acid molecule comprising: a thymine at a position corresponding to position 65,099 according to SEQ ID NO:4, or the complement thereof; a uracil at a position corresponding to position 642 according to SEQ ID NO:30, or the complement thereof; a uracil at a position corresponding to position 545 according to SEQ ID NO:31, or the complement thereof; a uracil at a position corresponding to position 598 according to SEQ ID NO:32, or the complement thereof; a uracil at a position corresponding to position 545 according to SEQ ID NO:33, or the complement thereof; a uracil at a position corresponding to position 583 according to SEQ ID NO:34, or the complement thereof; a uracil at a position corresponding to position 943 according to SEQ ID NO:35, or the complement thereof; a uracil at a position corresponding to position 405 according to SEQ ID NO:36, or the complement thereof; a thymine at a position corresponding to position 642 according to SEQ ID NO:73, or the complement thereof; a thymine at a position corresponding to position 545 according to SEQ ID NO:74, or the complement thereof; a thymine at a position corresponding to position 598 according to SEQ ID NO:75, or the complement thereof; a thymine at a position corresponding to position 545 according to SEQ ID NO:76, or the complement thereof; a thymine at a position corresponding to position 583 according to SEQ ID NO:77, or the complement thereof; a thymine at a position corresponding to position 943 according to SEQ ID NO:78, or the complement thereof; or a thymine at a position corresponding to position 405 according to SEQ ID NO:79, the complement thereof; and d) detecting the detectable label.

[0128] In some embodiments, the determining step, detecting step, or sequence analysis comprises: a) amplifying at least a portion of the WNT5B nucleic acid molecule, or the complement thereof, in the biological sample, wherein the amplified portion comprises: an adenine at a position corresponding to position 65,099 according to SEQ ID NO:5, or the complement thereof; an adenine at a position corresponding to position 642 according to SEQ ID NO:37, or the complement thereof; an adenine at a position corresponding to position 545 according to SEQ ID NO:38, or the complement thereof; an adenine at a position corresponding to position 598 according to SEQ ID NO:39, or the complement thereof; an adenine at a position corresponding to position 545 according to SEQ ID NO:40, or the complement thereof; an adenine at a position corresponding to position 583 according to SEQ ID NO:41, or the complement thereof; an adenine at a position corresponding to position 943 according to SEQ ID NO:42, or the complement thereof; an adenine at a position corresponding to position 405 according to SEQ ID NO:43, or the complement thereof; an adenine at a position corresponding to position 642 according to SEQ ID NO:80, or the complement thereof; an adenine at a position corresponding to position 545 according to SEQ ID NO:81, or the complement thereof; an adenine at a position corresponding to position 598 according to SEQ ID NO:82, or the complement thereof; an adenine at a position corresponding to position 545 according to SEQ ID NO:83, or the complement thereof; an adenine at a position corresponding to position 583 according to SEQ ID NO:84, or the complement thereof; an adenine at a position corresponding to position 943 according to SEQ ID NO:85, or the complement thereof; or an adenine at a position corresponding to position 405 according to SEQ ID NO:86, the complement thereof; b) labeling the amplified nucleic acid molecule with a detectable label; c) contacting the labeled nucleic acid molecule with a support comprising an alteration-specific probe, wherein the alteration-specific probe comprises a nucleotide sequence which hybridizes under stringent conditions to the nucleic acid sequence of the amplified nucleic acid molecule comprising: an adenine at a position corresponding to position 65,099 according to SEQ ID NO:5, or the complement thereof; an adenine at a position corresponding to position 642 according to SEQ ID NO:37, or the complement thereof; an adenine at a position corresponding to position 545 according to SEQ ID NO:38, or the complement thereof; an adenine at a position corresponding to position 598 according to SEQ ID NO:39, or the complement thereof; an adenine at a position corresponding to position 545 according to SEQ ID NO:40, or the complement thereof; an adenine at a position corresponding to position 583 according to SEQ ID NO:41, or the complement thereof; an adenine at a position corresponding to position 943 according to SEQ ID NO:42, or the complement thereof; an adenine at a position corresponding to position 405 according to SEQ ID NO:43, or the complement thereof; an adenine at a position corresponding to position 642 according to SEQ ID NO:80, or the complement thereof; an adenine at a position corresponding to position 545 according to SEQ ID NO:81, or the complement thereof; an adenine at a position corresponding to position 598 according to SEQ ID NO:82, or the complement thereof; an adenine at a position corresponding to position 545 according to SEQ ID NO:83, or the complement thereof; an adenine at a position corresponding to position 583 according to SEQ ID NO:84, or the complement thereof; an adenine at a position corresponding to position 943 according to SEQ ID NO:85, or the complement thereof; or an adenine at a position corresponding to position 405 according to SEQ ID NO:86, or the complement thereof; and d) detecting the detectable label.

[0129] In some embodiments, the determining step, detecting step, or sequence analysis comprises: a) amplifying at least a portion of the WNT5B nucleic acid molecule, or the complement thereof, in the biological sample, wherein the amplified portion comprises: a deletion of a TC dinucleotide at positions corresponding to positions 71,313-71,314 according to SEQ ID NO:6, or the complement thereof; a deletion of a UC dinucleotide at positions corresponding to positions 1,039-1,040 according to SEQ ID NO:44, or the complement thereof; a deletion of a UC dinucleotide at positions corresponding to positions 942-943 according to SEQ ID NO:45, or the complement thereof; a deletion of a UC dinucleotide at positions corresponding to positions 995-996 according to SEQ ID NO:46, or the complement thereof; a deletion of a UC dinucleotide at positions corresponding to positions 942-943 according to SEQ ID NO:47, or the complement thereof; a deletion of a UC dinucleotide at positions corresponding to positions 980-981 according to SEQ ID NO:48, or the complement thereof; a deletion of a UC dinucleotide at positions corresponding to positions 802-803 according to SEQ ID NO:49, or the complement thereof; a deletion of a TC dinucleotide at positions corresponding to positions 1,039-1,040 according to SEQ ID NO:87, or the complement thereof; a deletion of a TC dinucleotide at positions corresponding to positions 942-943 according to SEQ ID NO:88, or the complement thereof; a deletion of a TC dinucleotide at positions corresponding to positions 995-996 according to SEQ ID NO:89, or the complement thereof; a deletion of a TC dinucleotide at positions corresponding to positions 942-943 according to SEQ ID NO:90, or the complement thereof; a deletion of a TC dinucleotide at positions corresponding to positions 980-981 according to SEQ ID NO:91, or the complement thereof; or a deletion of a TC dinucleotide at positions corresponding to positions 802-803 according to SEQ ID NO:92, or the complement thereof; b) labeling the amplified nucleic acid molecule with a detectable label; c) contacting the labeled nucleic acid molecule with a support comprising an alteration-specific probe, wherein the alteration-specific probe comprises a nucleotide sequence which hybridizes under stringent conditions to the nucleic acid sequence of the amplified nucleic acid molecule comprising: a deletion of a TC dinucleotide at positions corresponding to positions 71,313-71,314 according to SEQ ID NO:6, or the complement thereof; a deletion of a UC dinucleotide at positions corresponding to positions 1,039-1,040 according to SEQ ID NO:44, or the complement thereof; a deletion of a UC dinucleotide at positions corresponding to positions 942-943 according to SEQ ID NO:45, or the complement thereof; a deletion of a UC dinucleotide at positions corresponding to positions 995-996 according to SEQ ID NO:46, or the complement thereof; a deletion of a UC dinucleotide at positions corresponding to positions 942-943 according to SEQ ID NO:47, or the complement thereof; a deletion of a UC dinucleotide at positions corresponding to positions 980-981 according to SEQ ID NO:48, or the complement thereof; a deletion of a UC dinucleotide at positions corresponding to positions 802-803 according to SEQ ID NO:49, or the complement thereof; a deletion of a TC dinucleotide at positions corresponding to positions 1,039-1,040 according to SEQ ID NO:87, or the complement thereof; a deletion of a TC dinucleotide at positions corresponding to positions 942-943 according to SEQ ID NO:88, or the complement thereof; a deletion of a TC dinucleotide at positions corresponding to positions 995-996 according to SEQ ID NO:89, or the complement thereof; a deletion of a TC dinucleotide at positions corresponding to positions 942-943 according to SEQ ID NO:90, or the complement thereof; a deletion of a TC dinucleotide at positions corresponding to positions 980-981 according to SEQ ID NO:91, or the complement thereof; or a deletion of a TC dinucleotide at positions corresponding to positions 802-803 according to SEQ ID NO:92, or the complement thereof; and d) detecting the detectable label.

[0130] In some embodiments, the determining step, detecting step, or sequence analysis comprises: a) amplifying at least a portion of the WNT5B genomic nucleic acid molecule, or the complement thereof, in the biological sample, wherein the portion comprises: a thymine at a position corresponding to position 56,698 according to SEQ ID NO:2, or the complement thereof; an adenine at a position corresponding to position 58,170 according to SEQ ID NO:3, or the complement thereof; a thymine at a position corresponding to position 65,099 according to SEQ ID NO:4, or the complement thereof; an adenine at a position corresponding to position 65,099 according to SEQ ID NO:5, or the complement thereof; or a deletion of a TC dinucleotide at positions corresponding to positions 71,313-71,314 according to SEQ ID NO:6, or the complement thereof; b) labeling the amplified nucleic acid molecule with a detectable label; c) contacting the labeled nucleic acid molecule with a support comprising an alteration-specific probe, wherein the alteration-specific probe comprises a nucleotide sequence which hybridizes under stringent conditions to the nucleic acid sequence of the amplified nucleic acid molecule comprising: a thymine at a position corresponding to position 56,698 according to SEQ ID NO:2, or the complement thereof; an adenine at a position corresponding to position 58,170 according to SEQ ID NO:3, or the complement thereof; a thymine at a position corresponding to position 65,099 according to SEQ ID NO:4, or the complement thereof; an adenine at a position corresponding to position 65,099 according to SEQ ID NO:5, or the complement thereof; or a deletion of a TC dinucleotide at positions corresponding to positions 71,313-71,314 according to SEQ ID NO:6, or the complement thereof; and d) detecting the detectable label.

[0131] In some embodiments, the determining step, detecting step, or sequence analysis comprises: a) amplifying at least a portion of the WNT5B mRNA molecule, or the complement thereof, in the biological sample, wherein the portion comprises: a uracil at a position corresponding to position 242 according to SEQ ID NO:15, or the complement thereof; a uracil at a position corresponding to position 145 according to SEQ ID NO:16, or the complement thereof; a uracil at a position corresponding to position 198 according to SEQ ID NO:17, or the complement thereof; a uracil at a position corresponding to position 40 according to SEQ ID NO:18, or the complement thereof; a uracil at a position corresponding to position 145 according to SEQ ID NO:19, or the complement thereof; a uracil at a position corresponding to position 183 according to SEQ ID NO:20, or the complement thereof; a uracil at a position corresponding to position 543 according to SEQ ID NO:21, or the complement thereof; an adenine at a position corresponding to position 491 according to SEQ ID NO:22, or the complement thereof; an adenine at a position corresponding to position 394 according to SEQ ID NO:23, or the complement thereof; an adenine at a position corresponding to position 447 according to SEQ ID NO:24, or the complement thereof; an adenine at a position corresponding to position 289 according to SEQ ID NO:25, or the complement thereof; an adenine at a position corresponding to position 394 according to SEQ ID NO:26, or the complement thereof; an adenine at a position corresponding to position 432 according to SEQ ID NO:27, or the complement thereof; an adenine at a position corresponding to position 792 according to SEQ ID NO:28, or the complement thereof; an adenine at a position corresponding to position 254 according to SEQ ID NO:29, or the complement thereof; a uracil at a position corresponding to position 642 according to SEQ ID NO:30, or the complement thereof; a uracil at a position corresponding to position 545 according to SEQ ID NO:31, or the complement thereof; a uracil at a position corresponding to position 598 according to SEQ ID NO:32, or the complement thereof; a uracil at a position corresponding to position 545 according to SEQ ID NO:33, or the complement thereof; a uracil at a position corresponding to position 583 according to SEQ ID NO:34, or the complement thereof; a uracil at a position corresponding to position 943 according to SEQ ID NO:35, or the complement thereof; a uracil at a position corresponding to position 405 according to SEQ ID NO:36, or the complement thereof; an adenine at a position corresponding to position 642 according to SEQ ID NO:37, or the complement thereof; an adenine at a position corresponding to position 545 according to SEQ ID NO:38, or the complement thereof; an adenine at a position corresponding to position 598 according to SEQ ID NO:39, or the complement thereof; an adenine at a position corresponding to position 545 according to SEQ ID NO:40, or the complement thereof; an adenine at a position corresponding to position 583 according to SEQ ID NO:41, or the complement thereof; an adenine at a position corresponding to position 943 according to SEQ ID NO:42, or the complement thereof; an adenine at a position corresponding to position 405 according to SEQ ID NO:43, or the complement thereof; a deletion of a UC dinucleotide at positions corresponding to positions 1,039-1,040 according to SEQ ID NO:44, or the complement thereof; a deletion of a UC dinucleotide at positions corresponding to positions 942-943 according to SEQ ID NO:45, or the complement thereof; a deletion of a UC dinucleotide at positions corresponding to positions 995-996 according to SEQ ID NO:46, or the complement thereof; a deletion of a UC dinucleotide at positions corresponding to positions 942-943 according to SEQ ID NO:47, or the complement thereof; a deletion of a UC dinucleotide at positions corresponding to positions 980-981 according to SEQ ID NO:48, or the complement thereof; or a deletion of a UC dinucleotide at positions corresponding to positions 802-803 according to SEQ ID NO:49, or the complement thereof; b) labeling the amplified nucleic acid molecule with a detectable label; c) contacting the labeled nucleic acid molecule with a support comprising an alteration-specific probe, wherein the alteration-specific probe comprises a nucleotide sequence which hybridizes under stringent conditions to the nucleic acid sequence of the amplified nucleic acid molecule comprising: a uracil at a position corresponding to position 242 according to SEQ ID NO:15, or the complement thereof; a uracil at a position corresponding to position 145 according to SEQ ID NO:16, or the complement thereof; a uracil at a position corresponding to position 198 according to SEQ ID NO:17, or the complement thereof; a uracil at a position corresponding to position 40 according to SEQ ID NO:18, or the complement thereof; a uracil at a position corresponding to position 145 according to SEQ ID NO:19, or the complement thereof; a uracil at a position corresponding to position 183 according to SEQ ID NO:20, or the complement thereof; a uracil at a position corresponding to position 543 according to SEQ ID NO:21, or the complement thereof; an adenine at a position corresponding to position 491 according to SEQ ID NO:22, or the complement thereof; an adenine at a position corresponding to position 394 according to SEQ ID NO:23, or the complement thereof; an adenine at a position corresponding to position 447 according to SEQ ID NO:24, or the complement thereof; an adenine at a position corresponding to position 289 according to SEQ ID NO:25, or the complement thereof; an adenine at a position corresponding to position 394 according to SEQ ID NO:26, or the complement thereof; an adenine at a position corresponding to position 432 according to SEQ ID NO:27, or the complement thereof; an adenine at a position corresponding to position 792 according to SEQ ID NO:28, or the complement thereof; an adenine at a position corresponding to position 254 according to SEQ ID NO:29, or the complement thereof; a uracil at a position corresponding to position 642 according to SEQ ID NO:30, or the complement thereof; a uracil at a position corresponding to position 545 according to SEQ ID NO:31, or the complement thereof; a uracil at a position corresponding to position 598 according to SEQ ID NO:32, or the complement thereof; a uracil at a position corresponding to position 545 according to SEQ ID NO:33, or the complement thereof; a uracil at a position corresponding to position 583 according to SEQ ID NO:34, or the complement thereof; a uracil at a position corresponding to position 943 according to SEQ ID NO:35, or the complement thereof; a uracil at a position corresponding to position 405 according to SEQ ID NO:36, or the complement thereof; an adenine at a position corresponding to position 642 according to SEQ ID NO:37, or the complement thereof; an adenine at a position corresponding to position 545 according to SEQ ID NO:38, or the complement thereof; an adenine at a position corresponding to position 598 according to SEQ ID NO:39, or the complement thereof; an adenine at a position corresponding to position 545 according to SEQ ID NO:40, or the complement thereof; an adenine at a position corresponding to position 583 according to SEQ ID NO:41, or the complement thereof; an adenine at a position corresponding to position 943 according to SEQ ID NO:42, or the complement thereof; an adenine at a position corresponding to position 405 according to SEQ ID NO:43, or the complement thereof; a deletion of a UC dinucleotide at positions corresponding to positions 1,039-1,040 according to SEQ ID NO:44, or the complement thereof; a deletion of a UC dinucleotide at positions corresponding to positions 942-943 according to SEQ ID NO:45, or the complement thereof; a deletion of a UC dinucleotide at positions corresponding to positions 995-996 according to SEQ ID NO:46, or the complement thereof; a deletion of a UC dinucleotide at positions corresponding to positions 942-943 according to SEQ ID NO:47, or the complement thereof; a deletion of a UC dinucleotide at positions corresponding to positions 980-981 according to SEQ ID NO:48, or the complement thereof; or a deletion of a UC dinucleotide at positions corresponding to positions 802-803 according to SEQ ID NO:49, the complement thereof; and d) detecting the detectable label.

[0132] In some embodiments, the determining step, detecting step, or sequence analysis comprises: a) amplifying at least a portion of the WNT5B cDNA molecule, or the complement thereof, in the biological sample, wherein the portion comprises: a thymine at a position corresponding to position 242 according to SEQ ID NO:58, or the complement thereof; a thymine at a position corresponding to position 145 according to SEQ ID NO:59, or the complement thereof; a thymine at a position corresponding to position 198 according to SEQ ID NO:60, or the complement thereof; a thymine at a position corresponding to position 40 according to SEQ ID NO:61, or the complement thereof; a thymine at a position corresponding to position 145 according to SEQ ID NO:62, or the complement thereof; a thymine at a position corresponding to position 183 according to SEQ ID NO:63, or the complement thereof; a thymine at a position corresponding to position 543 according to SEQ ID NO:64, or the complement thereof; an adenine at a position corresponding to position 491 according to SEQ ID NO:65, or the complement thereof; an adenine at a position corresponding to position 394 according to SEQ ID NO:66, or the complement thereof; an adenine at a position corresponding to position 447 according to SEQ ID NO:67, or the complement thereof; an adenine at a position corresponding to position 289 according to SEQ ID NO:68, or the complement thereof; an adenine at a position corresponding to position 394 according to SEQ ID NO:69, or the complement thereof; an adenine at a position corresponding to position 432 according to SEQ ID NO:70, or the complement thereof; an adenine at a position corresponding to position 792 according to SEQ ID NO:71, or the complement thereof; an adenine at a position corresponding to position 254 according to SEQ ID NO:72, or the complement thereof; a thymine at a position corresponding to position 642 according to SEQ ID NO:73, or the complement thereof; a thymine at a position corresponding to position 545 according to SEQ ID NO:74, or the complement thereof; a thymine at a position corresponding to position 598 according to SEQ ID NO:75, or the complement thereof; a thymine at a position corresponding to position 545 according to SEQ ID NO:76, or the complement thereof; a thymine at a position corresponding to position 583 according to SEQ ID NO:77, or the complement thereof; a thymine at a position corresponding to position 943 according to SEQ ID NO:78, or the complement thereof; a thymine at a position corresponding to position 405 according to SEQ ID NO:79, or the complement thereof; an adenine at a position corresponding to position 642 according to SEQ ID NO:80, or the complement thereof; an adenine at a position corresponding to position 545 according to SEQ ID NO:81, or the complement thereof; an adenine at a position corresponding to position 598 according to SEQ ID NO:82, or the complement thereof; an adenine at a position corresponding to position 545 according to SEQ ID NO:83, or the complement thereof; an adenine at a position corresponding to position 583 according to SEQ ID NO:84, or the complement thereof; an adenine at a position corresponding to position 943 according to SEQ ID NO:85, or the complement thereof; an adenine at a position corresponding to position 405 according to SEQ ID NO:86, or the complement thereof; a deletion of a TC dinucleotide at positions corresponding to positions 1,039-1,040 according to SEQ ID NO:87, or the complement thereof; a deletion of a TC dinucleotide at positions corresponding to positions 942-943 according to SEQ ID NO:88, or the complement thereof; a deletion of a TC dinucleotide at positions corresponding to positions 995-996 according to SEQ ID NO:89, or the complement thereof; a deletion of a TC dinucleotide at positions corresponding to positions 942-943 according to SEQ ID NO:90, or the complement thereof; a deletion of a TC dinucleotide at positions corresponding to positions 980-981 according to SEQ ID NO:91, or the complement thereof; or a deletion of a TC dinucleotide at positions corresponding to positions 802-803 according to SEQ ID NO:92, or the complement thereof; b) labeling the amplified nucleic acid molecule with a detectable label; c) contacting the labeled nucleic acid molecule with a support comprising an alteration-specific probe, wherein the alteration-specific probe comprises a nucleotide sequence which hybridizes under stringent conditions to the nucleic acid sequence of the amplified nucleic acid molecule comprising: a thymine at a position corresponding to position 242 according to SEQ ID NO:58, or the complement thereof; a thymine at a position corresponding to position 145 according to SEQ ID NO:59, or the complement thereof; a thymine at a position corresponding to position 198 according to SEQ ID NO:60, or the complement thereof; a thymine at a position corresponding to position 40 according to SEQ ID NO:61, or the complement thereof; a thymine at a position corresponding to position 145 according to SEQ ID NO:62, or the complement thereof; a thymine at a position corresponding to position 183 according to SEQ ID NO:63, or the complement thereof; a thymine at a position corresponding to position 543 according to SEQ ID NO:64, or the complement thereof; an adenine at a position corresponding to position 491 according to SEQ ID NO:65, or the complement thereof; an adenine at a position corresponding to position 394 according to SEQ ID NO:66, or the complement thereof; an adenine at a position corresponding to position 447 according to SEQ ID NO:67, or the complement thereof; an adenine at a position corresponding to position 289 according to SEQ ID NO:68, or the complement thereof; an adenine at a position corresponding to position 394 according to SEQ ID NO:69, or the complement thereof; an adenine at a position corresponding to position 432 according to SEQ ID NO:70, or the complement thereof; an adenine at a position corresponding to position 792 according to SEQ ID NO:71, or the complement thereof; an adenine at a position corresponding to position 254 according to SEQ ID NO:72, or the complement thereof; a thymine at a position corresponding to position 642 according to SEQ ID NO:73, or the complement thereof; a thymine at a position corresponding to position 545 according to SEQ ID NO:74, or the complement thereof; a thymine at a position corresponding to position 598 according to SEQ ID NO:75, or the complement thereof; a thymine at a position corresponding to position 545 according to SEQ ID NO:76, or the complement thereof; a thymine at a position corresponding to position 583 according to SEQ ID NO:77, or the complement thereof; a thymine at a position corresponding to position 943 according to SEQ ID NO:78, or the complement thereof; a thymine at a position corresponding to position 405 according to SEQ ID NO:79, or the complement thereof; an adenine at a position corresponding to position 642 according to SEQ ID NO:80, or the complement thereof; an adenine at a position corresponding to position 545 according to SEQ ID NO:81, or the complement thereof; an adenine at a position corresponding to position 598 according to SEQ ID NO:82, or the complement thereof; an adenine at a position corresponding to position 545 according to SEQ ID NO:83, or the complement thereof; an adenine at a position corresponding to position 583 according to SEQ ID NO:84, or the complement thereof; an adenine at a position corresponding to position 943 according to SEQ ID NO:85, or the complement thereof; an adenine at a position corresponding to position 405 according to SEQ ID NO:86, or the complement thereof; a deletion of a TC dinucleotide at positions corresponding to positions 1,039-1,040 according to SEQ ID NO:87, or the complement thereof; a deletion of a TC dinucleotide at positions corresponding to positions 942-943 according to SEQ ID NO:88, or the complement thereof; a deletion of a TC dinucleotide at positions corresponding to positions 995-996 according to SEQ ID NO:89, or the complement thereof; a deletion of a TC dinucleotide at positions corresponding to positions 942-943 according to SEQ ID NO:90, or the complement thereof; a deletion of a TC dinucleotide at positions corresponding to positions 980-981 according to SEQ ID NO:91, or the complement thereof; or a deletion of a TC dinucleotide at positions corresponding to positions 802-803 according to SEQ ID NO:92, the complement thereof; and d) detecting the detectable label.

[0133] In some embodiments, the nucleic acid molecule is mRNA and the determining step further comprises reverse-transcribing the mRNA into a cDNA prior to the amplifying step.

[0134] In some embodiments, the determining step, detecting step, or sequence analysis comprises: contacting the WNT5B nucleic acid molecule, or the complement thereof, in the biological sample with an alteration-specific probe comprising a detectable label, wherein the alteration-specific probe comprises a nucleotide sequence which hybridizes under stringent conditions to the nucleotide sequence of the WNT5B nucleic acid molecule, or the complement thereof, comprising: a thymine at a position corresponding to position 56,698 according to SEQ ID NO:2, or the complement thereof; a uracil at a position corresponding to position 242 according to SEQ ID NO:15, or the complement thereof; a uracil at a position corresponding to position 145 according to SEQ ID NO:16, or the complement thereof; a uracil at a position corresponding to position 198 according to SEQ ID NO:17, or the complement thereof; a uracil at a position corresponding to position 40 according to SEQ ID NO:18, or the complement thereof; a uracil at a position corresponding to position 145 according to SEQ ID NO:19, or the complement thereof; a uracil at a position corresponding to position 183 according to SEQ ID NO:20, or the complement thereof; a uracil at a position corresponding to position 543 according to SEQ ID NO:21, or the complement thereof; a thymine at a position corresponding to position 242 according to SEQ ID NO:58, or the complement thereof; a thymine at a position corresponding to position 145 according to SEQ ID NO:59, or the complement thereof; a thymine at a position corresponding to position 198 according to SEQ ID NO:60, or the complement thereof; a thymine at a position corresponding to position 40 according to SEQ ID NO:61, or the complement thereof; a thymine at a position corresponding to position 145 according to SEQ ID NO:62, or the complement thereof; a thymine at a position corresponding to position 183 according to SEQ ID NO:63, or the complement thereof; or a thymine at a position corresponding to position 543 according to SEQ ID NO:64, or the complement thereof; and detecting the detectable label.

[0135] In some embodiments, the determining step, detecting step, or sequence analysis comprises: contacting the WNT5B nucleic acid molecule, or the complement thereof, in the biological sample with an alteration-specific probe comprising a detectable label, wherein the alteration-specific probe comprises a nucleotide sequence which hybridizes under stringent conditions to the nucleotide sequence of the WNT5B nucleic acid molecule, or the complement thereof, comprising: an adenine at a position corresponding to position 58,170 according to SEQ ID NO:3, or the complement thereof; an adenine at a position corresponding to position 491 according to SEQ ID NO:22, or the complement thereof; an adenine at a position corresponding to position 394 according to SEQ ID NO:23, or the complement thereof; an adenine at a position corresponding to position 447 according to SEQ ID NO:24, or the complement thereof; an adenine at a position corresponding to position 289 according to SEQ ID NO:25, or the complement thereof; an adenine at a position corresponding to position 394 according to SEQ ID NO:26, or the complement thereof; an adenine at a position corresponding to position 432 according to SEQ ID NO:27, or the complement thereof; an adenine at a position corresponding to position 792 according to SEQ ID NO:28, or the complement thereof; an adenine at a position corresponding to position 254 according to SEQ ID NO:29, or the complement thereof; an adenine at a position corresponding to position 491 according to SEQ ID NO:65, or the complement thereof; an adenine at a position corresponding to position 394 according to SEQ ID NO:66, or the complement thereof; an adenine at a position corresponding to position 447 according to SEQ ID NO:67, or the complement thereof; an adenine at a position corresponding to position 289 according to SEQ ID NO:68, or the complement thereof; an adenine at a position corresponding to position 394 according to SEQ ID NO:69, or the complement thereof; an adenine at a position corresponding to position 432 according to SEQ ID NO:70, or the complement thereof; an adenine at a position corresponding to position 792 according to SEQ ID NO:71, or the complement thereof; or an adenine at a position corresponding to position 254 according to SEQ ID NO:72, or the complement thereof; and detecting the detectable label.

[0136] In some embodiments, the determining step, detecting step, or sequence analysis comprises: contacting the WNT5B nucleic acid molecule, or the complement thereof, in the biological sample with an alteration-specific probe comprising a detectable label, wherein the alteration-specific probe comprises a nucleotide sequence which hybridizes under stringent conditions to the nucleotide sequence of the WNT5B nucleic acid molecule, or the complement thereof, comprising: a thymine at a position corresponding to position 65,099 according to SEQ ID NO:4, or the complement thereof; a uracil at a position corresponding to position 642 according to SEQ ID NO:30, or the complement thereof; a uracil at a position corresponding to position 545 according to SEQ ID NO:31, or the complement thereof; a uracil at a position corresponding to position 598 according to SEQ ID NO:32, or the complement thereof; a uracil at a position corresponding to position 545 according to SEQ ID NO:33, or the complement thereof; a uracil at a position corresponding to position 583 according to SEQ ID NO:34, or the complement thereof; a uracil at a position corresponding to position 943 according to SEQ ID NO:35, or the complement thereof; a uracil at a position corresponding to position 405 according to SEQ ID NO:36, or the complement thereof; a thymine at a position corresponding to position 642 according to SEQ ID NO:73, or the complement thereof; a thymine at a position corresponding to position 545 according to SEQ ID NO:74, or the complement thereof; a thymine at a position corresponding to position 598 according to SEQ ID NO:75, or the complement thereof; a thymine at a position corresponding to position 545 according to SEQ ID NO:76, or the complement thereof; a thymine at a position corresponding to position 583 according to SEQ ID NO:77, or the complement thereof; a thymine at a position corresponding to position 943 according to SEQ ID NO:78, or the complement thereof; or a thymine at a position corresponding to position 405 according to SEQ ID NO:79, or the complement thereof; and detecting the detectable label.

[0137] In some embodiments, the determining step, detecting step, or sequence analysis comprises: contacting the WNT5B nucleic acid molecule, or the complement thereof, in the biological sample with an alteration-specific probe comprising a detectable label, wherein the alteration-specific probe comprises a nucleotide sequence which hybridizes under stringent conditions to the nucleotide sequence of the WNT5B nucleic acid molecule, or the complement thereof, comprising: an adenine at a position corresponding to position 65,099 according to SEQ ID NO:5, or the complement thereof; an adenine at a position corresponding to position 642 according to SEQ ID NO:37, or the complement thereof; an adenine at a position corresponding to position 545 according to SEQ ID NO:38, or the complement thereof; an adenine at a position corresponding to position 598 according to SEQ ID NO:39, or the complement thereof; an adenine at a position corresponding to position 545 according to SEQ ID NO:40, or the complement thereof; an adenine at a position corresponding to position 583 according to SEQ ID NO:41, or the complement thereof; an adenine at a position corresponding to position 943 according to SEQ ID NO:42, or the complement thereof; an adenine at a position corresponding to position 405 according to SEQ ID NO:43, or the complement thereof; an adenine at a position corresponding to position 642 according to SEQ ID NO:80, or the complement thereof; an adenine at a position corresponding to position 545 according to SEQ ID NO:81, or the complement thereof; an adenine at a position corresponding to position 598 according to SEQ ID NO:82, or the complement thereof; an adenine at a position corresponding to position 545 according to SEQ ID NO:83, or the complement thereof; an adenine at a position corresponding to position 583 according to SEQ ID NO:84, or the complement thereof; an adenine at a position corresponding to position 943 according to SEQ ID NO:85, or the complement thereof; or an adenine at a position corresponding to position 405 according to SEQ ID NO:86, or the complement thereof; and detecting the detectable label.

[0138] In some embodiments, the determining step, detecting step, or sequence analysis comprises: contacting the WNT5B nucleic acid molecule, or the complement thereof, in the biological sample with an alteration-specific probe comprising a detectable label, wherein the alteration-specific probe comprises a nucleotide sequence which hybridizes under stringent conditions to the nucleotide sequence of the WNT5B nucleic acid molecule, or the complement thereof, comprising: a deletion of a TC dinucleotide at positions corresponding to positions 71,313-71,314 according to SEQ ID NO:6, or the complement thereof; a deletion of a UC dinucleotide at positions corresponding to positions 1,039-1,040 according to SEQ ID NO:44, or the complement thereof; a deletion of a UC dinucleotide at positions corresponding to positions 942-943 according to SEQ ID NO:45, or the complement thereof; a deletion of a UC dinucleotide at positions corresponding to positions 995-996 according to SEQ ID NO:46, or the complement thereof; a deletion of a UC dinucleotide at positions corresponding to positions 942-943 according to SEQ ID NO:47, or the complement thereof; a deletion of a UC dinucleotide at positions corresponding to positions 980-981 according to SEQ ID NO:48, or the complement thereof; a deletion of a UC dinucleotide at positions corresponding to positions 802-803 according to SEQ ID NO:49, or the complement thereof; a deletion of a TC dinucleotide at positions corresponding to positions 1,039-1,040 according to SEQ ID NO:87, or the complement thereof; a deletion of a TC dinucleotide at positions corresponding to positions 942-943 according to SEQ ID NO:88, or the complement thereof; a deletion of a TC dinucleotide at positions corresponding to positions 995-996 according to SEQ ID NO:89, or the complement thereof; a deletion of a TC dinucleotide at positions corresponding to positions 942-943 according to SEQ ID NO:90, or the complement thereof; a deletion of a TC dinucleotide at positions corresponding to positions 980-981 according to SEQ ID NO:91, or the complement thereof; or a deletion of a TC dinucleotide at positions corresponding to positions 802-803 according to SEQ ID NO:92, or the complement thereof; and detecting the detectable label.

[0139] In some embodiments, the determining step, detecting step, or sequence analysis comprises: contacting the WNT5B genomic nucleic acid molecule, or the complement thereof, in the biological sample with an alteration-specific probe comprising a detectable label, wherein the alteration-specific probe comprises a nucleotide sequence which hybridizes under stringent conditions to the nucleotide sequence of the WNT5B genomic nucleic acid molecule, or the complement thereof, comprising: a thymine at a position corresponding to position 56,698 according to SEQ ID NO:2, or the complement thereof; an adenine at a position corresponding to position 58,170 according to SEQ ID NO:3, or the complement thereof; a thymine at a position corresponding to position 65,099 according to SEQ ID NO:4, or the complement thereof; an adenine at a position corresponding to position 65,099 according to SEQ ID NO:5, or the complement thereof; or a deletion of a TC dinucleotide at positions corresponding to positions 71,313-71,314 according to SEQ ID NO:6, or the complement thereof; and detecting the detectable label.

[0140] In some embodiments, the determining step, detecting step, or sequence analysis comprises: contacting the WNT5B mRNA molecule, or the complement thereof, in the biological sample with an alteration-specific probe comprising a detectable label, wherein the alteration-specific probe comprises a nucleotide sequence which hybridizes under stringent conditions to the nucleotide sequence of the WNT5B mRNA molecule, or the complement thereof, comprising: a uracil at a position corresponding to position 242 according to SEQ ID NO:15, or the complement thereof; a uracil at a position corresponding to position 145 according to SEQ ID NO:16, or the complement thereof; a uracil at a position corresponding to position 198 according to SEQ ID NO:17, or the complement thereof; a uracil at a position corresponding to position 40 according to SEQ ID NO:18, or the complement thereof; a uracil at a position corresponding to position 145 according to SEQ ID NO:19, or the complement thereof; a uracil at a position corresponding to position 183 according to SEQ ID NO:20, or the complement thereof; a uracil at a position corresponding to position 543 according to SEQ ID NO:21, or the complement thereof; an adenine at a position corresponding to position 491 according to SEQ ID NO:22, or the complement thereof; an adenine at a position corresponding to position 394 according to SEQ ID NO:23, or the complement thereof; an adenine at a position corresponding to position 447 according to SEQ ID NO:24, or the complement thereof; an adenine at a position corresponding to position 289 according to SEQ ID NO:25, or the complement thereof; an adenine at a position corresponding to position 394 according to SEQ ID NO:26, or the complement thereof; an adenine at a position corresponding to position 432 according to SEQ ID NO:27, or the complement thereof; an adenine at a position corresponding to position 792 according to SEQ ID NO:28, or the complement thereof; an adenine at a position corresponding to position 254 according to SEQ ID NO:29, or the complement thereof; a uracil at a position corresponding to position 642 according to SEQ ID NO:30, or the complement thereof; a uracil at a position corresponding to position 545 according to SEQ ID NO:31, or the complement thereof; a uracil at a position corresponding to position 598 according to SEQ ID NO:32, or the complement thereof; a uracil at a position corresponding to position 545 according to SEQ ID NO:33, or the complement thereof; a uracil at a position corresponding to position 583 according to SEQ ID NO:34, or the complement thereof; a uracil at a position corresponding to position 943 according to SEQ ID NO:35, or the complement thereof; a uracil at a position corresponding to position 405 according to SEQ ID NO:36, or the complement thereof; an adenine at a position corresponding to position 642 according to SEQ ID NO:37, or the complement thereof; an adenine at a position corresponding to position 545 according to SEQ ID NO:38, or the complement thereof; an adenine at a position corresponding to position 598 according to SEQ ID NO:39, or the complement thereof; an adenine at a position corresponding to position 545 according to SEQ ID NO:40, or the complement thereof; an adenine at a position corresponding to position 583 according to SEQ ID NO:41, or the complement thereof; an adenine at a position corresponding to position 943 according to SEQ ID NO:42, or the complement thereof; an adenine at a position corresponding to position 405 according to SEQ ID NO:43, or the complement thereof; a deletion of a UC dinucleotide at positions corresponding to positions 1,039-1,040 according to SEQ ID NO:44, or the complement thereof; a deletion of a UC dinucleotide at positions corresponding to positions 942-943 according to SEQ ID NO:45, or the complement thereof; a deletion of a UC dinucleotide at positions corresponding to positions 995-996 according to SEQ ID NO:46, or the complement thereof; a deletion of a UC dinucleotide at positions corresponding to positions 942-943 according to SEQ ID NO:47, or the complement thereof; a deletion of a UC dinucleotide at positions corresponding to positions 980-981 according to SEQ ID NO:48, or the complement thereof; or a deletion of a UC dinucleotide at positions corresponding to positions 802-803 according to SEQ ID NO:49, or the complement thereof; and detecting the detectable label.

[0141] In some embodiments, the determining step, detecting step, or sequence analysis comprises: contacting the WNT5B cDNA molecule, or the complement thereof, produced from an mRNA molecule in the biological sample with an alteration-specific probe comprising a detectable label, wherein the alteration-specific probe comprises a nucleotide sequence which hybridizes under stringent conditions to the nucleotide sequence of the WNT5B cDNA molecule, or the complement thereof, comprising: a thymine at a position corresponding to position 242 according to SEQ ID NO:58, or the complement thereof; a thymine at a position corresponding to position 145 according to SEQ ID NO:59, or the complement thereof; a thymine at a position corresponding to position 198 according to SEQ ID NO:60, or the complement thereof; a thymine at a position corresponding to position 40 according to SEQ ID NO:61, or the complement thereof; a thymine at a position corresponding to position 145 according to SEQ ID NO:62, or the complement thereof; a thymine at a position corresponding to position 183 according to SEQ ID NO:63, or the complement thereof; a thymine at a position corresponding to position 543 according to SEQ ID NO:64, or the complement thereof; an adenine at a position corresponding to position 491 according to SEQ ID NO:65, or the complement thereof; an adenine at a position corresponding to position 394 according to SEQ ID NO:66, or the complement thereof; an adenine at a position corresponding to position 447 according to SEQ ID NO:67, or the complement thereof; an adenine at a position corresponding to position 289 according to SEQ ID NO:68, or the complement thereof; an adenine at a position corresponding to position 394 according to SEQ ID NO:69, or the complement thereof; an adenine at a position corresponding to position 432 according to SEQ ID NO:70, or the complement thereof; an adenine at a position corresponding to position 792 according to SEQ ID NO:71, or the complement thereof; an adenine at a position corresponding to position 254 according to SEQ ID NO:72, or the complement thereof; a thymine at a position corresponding to position 642 according to SEQ ID NO:73, or the complement thereof; a thymine at a position corresponding to position 545 according to SEQ ID NO:74, or the complement thereof; a thymine at a position corresponding to position 598 according to SEQ ID NO:75, or the complement thereof; a thymine at a position corresponding to position 545 according to SEQ ID NO:76, or the complement thereof; a thymine at a position corresponding to position 583 according to SEQ ID NO:77, or the complement thereof; a thymine at a position corresponding to position 943 according to SEQ ID NO:78, or the complement thereof; a thymine at a position corresponding to position 405 according to SEQ ID NO:79, or the complement thereof; an adenine at a position corresponding to position 642 according to SEQ ID NO:80, or the complement thereof; an adenine at a position corresponding to position 545 according to SEQ ID NO:81, or the complement thereof; an adenine at a position corresponding to position 598 according to SEQ ID NO:82, or the complement thereof; an adenine at a position corresponding to position 545 according to SEQ ID NO:83, or the complement thereof; an adenine at a position corresponding to position 583 according to SEQ ID NO:84, or the complement thereof; an adenine at a position corresponding to position 943 according to SEQ ID NO:85, or the complement thereof; an adenine at a position corresponding to position 405 according to SEQ ID NO:86, or the complement thereof; a deletion of a TC dinucleotide at positions corresponding to positions 1,039-1,040 according to SEQ ID NO:87, or the complement thereof; a deletion of a TC dinucleotide at positions corresponding to positions 942-943 according to SEQ ID NO:88, or the complement thereof; a deletion of a TC dinucleotide at positions corresponding to positions 995-996 according to SEQ ID NO:89, or the complement thereof; a deletion of a TC dinucleotide at positions corresponding to positions 942-943 according to SEQ ID NO:90, or the complement thereof; a deletion of a TC dinucleotide at positions corresponding to positions 980-981 according to SEQ ID NO:91, or the complement thereof; or a deletion of a TC dinucleotide at positions corresponding to positions 802-803 according to SEQ ID NO:92, or the complement thereof; and detecting the detectable label.

[0142] In some embodiments, the WNT5B nucleic acid molecule is present within a cell obtained from the subject.

[0143] Alteration-specific polymerase chain reaction techniques can be used to detect mutations such as SNPs in a nucleic acid sequence. Alteration-specific primers can be used because the DNA polymerase will not extend when a mismatch with the template is present.

[0144] In some embodiments, the determining step, detecting step, or sequence analysis comprises contacting the biological sample with a primer or probe, such as an alteration-specific primer or alteration-specific probe, that specifically hybridizes to a WNT5B variant genomic sequence, variant mRNA sequence, or variant cDNA sequence and not the corresponding WNT5B reference sequence under stringent conditions, and determining whether hybridization has occurred.

[0145] In some embodiments, the assay comprises RNA sequencing (RNA-Seq). In some embodiments, the assays also comprise reverse transcribing mRNA into cDNA, such as by the reverse transcriptase polymerase chain reaction (RT-PCR).

[0146] In some embodiments, the methods utilize probes and primers of sufficient nucleotide length to bind to the target nucleotide sequence and specifically detect and/or identify a polynucleotide comprising a WNT5B variant genomic nucleic acid molecule, variant mRNA molecule, or variant cDNA molecule. The hybridization conditions or reaction conditions can be determined by the operator to achieve this result. The nucleotide length may be any length that is sufficient for use in a detection method of choice, including any assay described or exemplified herein. Such probes and primers can hybridize specifically to a target nucleotide sequence under high stringency hybridization conditions. Probes and primers may have complete nucleotide sequence identity of contiguous nucleotides within the target nucleotide sequence, although probes differing from the target nucleotide sequence and that retain the ability to specifically detect and/or identify a target nucleotide sequence may be designed by conventional methods. Probes and primers can have about 80%, about 85%, about 90%, about 91%, about 92%, about 93%, about 94%, about 95%, about 96%, about 97%, about 98%, about 99%, or 100% sequence identity or complementarity with the nucleotide sequence of the target nucleic acid molecule.

[0147] In some embodiments, to determine whether a WNT5B nucleic acid molecule (genomic nucleic acid molecule, mRNA molecule, or cDNA molecule), or complement thereof, within a biological sample comprises a nucleotide sequence comprising a thymine at a position corresponding to position 56,698 according to SEQ ID NO:2, a uracil at a position corresponding to position 242 according to SEQ ID NO:15, a uracil at a position corresponding to position 145 according to SEQ ID NO:16, a uracil at a position corresponding to position 198 according to SEQ ID NO:17, a uracil at a position corresponding to position 40 according to SEQ ID NO:18, a uracil at a position corresponding to position 145 according to SEQ ID NO:19, a uracil at a position corresponding to position 183 according to SEQ ID NO:20, a uracil at a position corresponding to position 543 according to SEQ ID NO:21, a thymine at a position corresponding to position 242 according to SEQ ID NO:58, a thymine at a position corresponding to position 145 according to SEQ ID NO:59, a thymine at a position corresponding to position 198 according to SEQ ID NO:60, a thymine at a position corresponding to position 40 according to SEQ ID NO:61, a thymine at a position corresponding to position 145 according to SEQ ID NO:62, a thymine at a position corresponding to position 183 according to SEQ ID NO:63, or a thymine at a position corresponding to position 543 according to SEQ ID NO:64, the biological sample can be subjected to an amplification method using a primer pair that includes a first primer derived from the 5′ flanking sequence adjacent to a thymine at a position corresponding to position 56,698 according to SEQ ID NO:2, a uracil at a position corresponding to position 242 according to SEQ ID NO:15, a uracil at a position corresponding to position 145 according to SEQ ID NO:16, a uracil at a position corresponding to position 198 according to SEQ ID NO:17, a uracil at a position corresponding to position 40 according to SEQ ID NO:18, a uracil at a position corresponding to position 145 according to SEQ ID NO:19, a uracil at a position corresponding to position 183 according to SEQ ID NO:20, a uracil at a position corresponding to position 543 according to SEQ ID NO:21, a thymine at a position corresponding to position 242 according to SEQ ID NO:58, a thymine at a position corresponding to position 145 according to SEQ ID NO:59, a thymine at a position corresponding to position 198 according to SEQ ID NO:60, a thymine at a position corresponding to position 40 according to SEQ ID NO:61, a thymine at a position corresponding to position 145 according to SEQ ID NO:62, a thymine at a position corresponding to position 183 according to SEQ ID NO:63, or a thymine at a position corresponding to position 543 according to SEQ ID NO:64, and a second primer derived from the 3′ flanking sequence adjacent to a thymine at a position corresponding to position 56,698 according to SEQ ID NO:2, a uracil at a position corresponding to position 242 according to SEQ ID NO:15, a uracil at a position corresponding to position 145 according to SEQ ID NO:16, a uracil at a position corresponding to position 198 according to SEQ ID NO:17, a uracil at a position corresponding to position 40 according to SEQ ID NO:18, a uracil at a position corresponding to position 145 according to SEQ ID NO:19, a uracil at a position corresponding to position 183 according to SEQ ID NO:20, a uracil at a position corresponding to position 543 according to SEQ ID NO:21, a thymine at a position corresponding to position 242 according to SEQ ID NO:58, a thymine at a position corresponding to position 145 according to SEQ ID NO:59, a thymine at a position corresponding to position 198 according to SEQ ID NO:60, a thymine at a position corresponding to position 40 according to SEQ ID NO:61, a thymine at a position corresponding to position 145 according to SEQ ID NO:62, a thymine at a position corresponding to position 183 according to SEQ ID NO:63, or a thymine at a position corresponding to position 543 according to SEQ ID NO:64 to produce an amplicon that is indicative of the presence of the SNP at positions encoding a thymine at a position corresponding to position 56,698 according to SEQ ID NO:2, a uracil at a position corresponding to position 242 according to SEQ ID NO:15, a uracil at a position corresponding to position 145 according to SEQ ID NO:16, a uracil at a position corresponding to position 198 according to SEQ ID NO:17, a uracil at a position corresponding to position 40 according to SEQ ID NO:18, a uracil at a position corresponding to position 145 according to SEQ ID NO:19, a uracil at a position corresponding to position 183 according to SEQ ID NO:20, a uracil at a position corresponding to position 543 according to SEQ ID NO:21, a thymine at a position corresponding to position 242 according to SEQ ID NO:58, a thymine at a position corresponding to position 145 according to SEQ ID NO:59, a thymine at a position corresponding to position 198 according to SEQ ID NO:60, a thymine at a position corresponding to position 40 according to SEQ ID NO:61, a thymine at a position corresponding to position 145 according to SEQ ID NO:62, a thymine at a position corresponding to position 183 according to SEQ ID NO:63, or a thymine at a position corresponding to position 543 according to SEQ ID NO:64. In some embodiments, the amplicon may range in length from the combined length of the primer pairs plus one nucleotide base pair to any length of amplicon producible by a DNA amplification protocol. This distance can range from one nucleotide base pair up to the limits of the amplification reaction, or about twenty thousand nucleotide base pairs. Optionally, the primer pair flanks a region including positions comprising a thymine at a position corresponding to position 56,698 according to SEQ ID NO:2, a uracil at a position corresponding to position 242 according to SEQ ID NO:15, a uracil at a position corresponding to position 145 according to SEQ ID NO:16, a uracil at a position corresponding to position 198 according to SEQ ID NO:17, a uracil at a position corresponding to position 40 according to SEQ ID NO:18, a uracil at a position corresponding to position 145 according to SEQ ID NO:19, a uracil at a position corresponding to position 183 according to SEQ ID NO:20, a uracil at a position corresponding to position 543 according to SEQ ID NO:21, a thymine at a position corresponding to position 242 according to SEQ ID NO:58, a thymine at a position corresponding to position 145 according to SEQ ID NO:59, a thymine at a position corresponding to position 198 according to SEQ ID NO:60, a thymine at a position corresponding to position 40 according to SEQ ID NO:61, a thymine at a position corresponding to position 145 according to SEQ ID NO:62, a thymine at a position corresponding to position 183 according to SEQ ID NO:63, or a thymine at a position corresponding to position 543 according to SEQ ID NO:64 and at least 1, 2, 3, 4, 5, 6, 7, 8, 9, 10, or more nucleotides on each side of positions comprising a thymine at a position corresponding to position 56,698 according to SEQ ID NO:2, a uracil at a position corresponding to position 242 according to SEQ ID NO:15, a uracil at a position corresponding to position 145 according to SEQ ID NO:16, a uracil at a position corresponding to position 198 according to SEQ ID NO:17, a uracil at a position corresponding to position 40 according to SEQ ID NO:18, a uracil at a position corresponding to position 145 according to SEQ ID NO:19, a uracil at a position corresponding to position 183 according to SEQ ID NO:20, a uracil at a position corresponding to position 543 according to SEQ ID NO:21, a thymine at a position corresponding to position 242 according to SEQ ID NO:58, a thymine at a position corresponding to position 145 according to SEQ ID NO:59, a thymine at a position corresponding to position 198 according to SEQ ID NO:60, a thymine at a position corresponding to position 40 according to SEQ ID NO:61, a thymine at a position corresponding to position 145 according to SEQ ID NO:62, a thymine at a position corresponding to position 183 according to SEQ ID NO:63, or a thymine at a position corresponding to position 543 according to SEQ ID NO:64.

[0148] In some embodiments, to determine whether a WNT5B nucleic acid molecule (genomic nucleic acid molecule, mRNA molecule, or cDNA molecule), or complement thereof, within a biological sample comprises a nucleotide sequence comprising an adenine at a position corresponding to position 58,170 according to SEQ ID NO:3, an adenine at a position corresponding to position 491 according to SEQ ID NO:22, an adenine at a position corresponding to position 394 according to SEQ ID NO:23, an adenine at a position corresponding to position 447 according to SEQ ID NO:24, an adenine at a position corresponding to position 289 according to SEQ ID NO:25, an adenine at a position corresponding to position 394 according to SEQ ID NO:26, an adenine at a position corresponding to position 432 according to SEQ ID NO:27, an adenine at a position corresponding to position 792 according to SEQ ID NO:28, an adenine at a position corresponding to position 254 according to SEQ ID NO:29, an adenine at a position corresponding to position 491 according to SEQ ID NO:65, an adenine at a position corresponding to position 394 according to SEQ ID NO:66, an adenine at a position corresponding to position 447 according to SEQ ID NO:67, an adenine at a position corresponding to position 289 according to SEQ ID NO:68, an adenine at a position corresponding to position 394 according to SEQ ID NO:69, an adenine at a position corresponding to position 432 according to SEQ ID NO:70, an adenine at a position corresponding to position 792 according to SEQ ID NO:71, or an adenine at a position corresponding to position 254 according to SEQ ID NO:72, the biological sample can be subjected to an amplification method using a primer pair that includes a first primer derived from the 5′ flanking sequence adjacent to an adenine at a position corresponding to position 58,170 according to SEQ ID NO:3, an adenine at a position corresponding to position 491 according to SEQ ID NO:22, an adenine at a position corresponding to position 394 according to SEQ ID NO:23, an adenine at a position corresponding to position 447 according to SEQ ID NO:24, an adenine at a position corresponding to position 289 according to SEQ ID NO:25, an adenine at a position corresponding to position 394 according to SEQ ID NO:26, an adenine at a position corresponding to position 432 according to SEQ ID NO:27, an adenine at a position corresponding to position 792 according to SEQ ID NO:28, an adenine at a position corresponding to position 254 according to SEQ ID NO:29, an adenine at a position corresponding to position 491 according to SEQ ID NO:65, an adenine at a position corresponding to position 394 according to SEQ ID NO:66, an adenine at a position corresponding to position 447 according to SEQ ID NO:67, an adenine at a position corresponding to position 289 according to SEQ ID NO:68, an adenine at a position corresponding to position 394 according to SEQ ID NO:69, an adenine at a position corresponding to position 432 according to SEQ ID NO:70, an adenine at a position corresponding to position 792 according to SEQ ID NO:71, or an adenine at a position corresponding to position 254 according to SEQ ID NO:72, and a second primer derived from the 3′ flanking sequence adjacent to an adenine at a position corresponding to position 58,170 according to SEQ ID NO:3, an adenine at a position corresponding to position 491 according to SEQ ID NO:22, an adenine at a position corresponding to position 394 according to SEQ ID NO:23, an adenine at a position corresponding to position 447 according to SEQ ID NO:24, an adenine at a position corresponding to position 289 according to SEQ ID NO:25, an adenine at a position corresponding to position 394 according to SEQ ID NO:26, an adenine at a position corresponding to position 432 according to SEQ ID NO:27, an adenine at a position corresponding to position 792 according to SEQ ID NO:28, an adenine at a position corresponding to position 254 according to SEQ ID NO:29, an adenine at a position corresponding to position 491 according to SEQ ID NO:65, an adenine at a position corresponding to position 394 according to SEQ ID NO:66, an adenine at a position corresponding to position 447 according to SEQ ID NO:67, an adenine at a position corresponding to position 289 according to SEQ ID NO:68, an adenine at a position corresponding to position 394 according to SEQ ID NO:69, an adenine at a position corresponding to position 432 according to SEQ ID NO:70, an adenine at a position corresponding to position 792 according to SEQ ID NO:71, or an adenine at a position corresponding to position 254 according to SEQ ID NO:72 to produce an amplicon that is indicative of the presence of the SNP at positions encoding an adenine at a position corresponding to position 58,170 according to SEQ ID NO:3, an adenine at a position corresponding to position 491 according to SEQ ID NO:22, an adenine at a position corresponding to position 394 according to SEQ ID NO:23, an adenine at a position corresponding to position 447 according to SEQ ID NO:24, an adenine at a position corresponding to position 289 according to SEQ ID NO:25, an adenine at a position corresponding to position 394 according to SEQ ID NO:26, an adenine at a position corresponding to position 432 according to SEQ ID NO:27, an adenine at a position corresponding to position 792 according to SEQ ID NO:28, an adenine at a position corresponding to position 254 according to SEQ ID NO:29, an adenine at a position corresponding to position 491 according to SEQ ID NO:65, an adenine at a position corresponding to position 394 according to SEQ ID NO:66, an adenine at a position corresponding to position 447 according to SEQ ID NO:67, an adenine at a position corresponding to position 289 according to SEQ ID NO:68, an adenine at a position corresponding to position 394 according to SEQ ID NO:69, an adenine at a position corresponding to position 432 according to SEQ ID NO:70, an adenine at a position corresponding to position 792 according to SEQ ID NO:71, or an adenine at a position corresponding to position 254 according to SEQ ID NO:72. In some embodiments, the amplicon may range in length from the combined length of the primer pairs plus one nucleotide base pair to any length of amplicon producible by a DNA amplification protocol. This distance can range from one nucleotide base pair up to the limits of the amplification reaction, or about twenty thousand nucleotide base pairs. Optionally, the primer pair flanks a region including positions comprising an adenine at a position corresponding to position 58,170 according to SEQ ID NO:3, an adenine at a position corresponding to position 491 according to SEQ ID NO:22, an adenine at a position corresponding to position 394 according to SEQ ID NO:23, an adenine at a position corresponding to position 447 according to SEQ ID NO:24, an adenine at a position corresponding to position 289 according to SEQ ID NO:25, an adenine at a position corresponding to position 394 according to SEQ ID NO:26, an adenine at a position corresponding to position 432 according to SEQ ID NO:27, an adenine at a position corresponding to position 792 according to SEQ ID NO:28, an adenine at a position corresponding to position 254 according to SEQ ID NO:29, an adenine at a position corresponding to position 491 according to SEQ ID NO:65, an adenine at a position corresponding to position 394 according to SEQ ID NO:66, an adenine at a position corresponding to position 447 according to SEQ ID NO:67, an adenine at a position corresponding to position 289 according to SEQ ID NO:68, an adenine at a position corresponding to position 394 according to SEQ ID NO:69, an adenine at a position corresponding to position 432 according to SEQ ID NO:70, an adenine at a position corresponding to position 792 according to SEQ ID NO:71, or an adenine at a position corresponding to position 254 according to SEQ ID NO:72, and at least 1, 2, 3, 4, 5, 6, 7, 8, 9, 10, or more nucleotides on each side of positions comprising an adenine at a position corresponding to position 58,170 according to SEQ ID NO:3, an adenine at a position corresponding to position 491 according to SEQ ID NO:22, an adenine at a position corresponding to position 394 according to SEQ ID NO:23, an adenine at a position corresponding to position 447 according to SEQ ID NO:24, an adenine at a position corresponding to position 289 according to SEQ ID NO:25, an adenine at a position corresponding to position 394 according to SEQ ID NO:26, an adenine at a position corresponding to position 432 according to SEQ ID NO:27, an adenine at a position corresponding to position 792 according to SEQ ID NO:28, an adenine at a position corresponding to position 254 according to SEQ ID NO:29, an adenine at a position corresponding to position 491 according to SEQ ID NO:65, an adenine at a position corresponding to position 394 according to SEQ ID NO:66, an adenine at a position corresponding to position 447 according to SEQ ID NO:67, an adenine at a position corresponding to position 289 according to SEQ ID NO:68, an adenine at a position corresponding to position 394 according to SEQ ID NO:69, an adenine at a position corresponding to position 432 according to SEQ ID NO:70, an adenine at a position corresponding to position 792 according to SEQ ID NO:71, or an adenine at a position corresponding to position 254 according to SEQ ID NO:72.

[0149] In some embodiments, to determine whether a WNT5B nucleic acid molecule (genomic nucleic acid molecule, mRNA molecule, or cDNA molecule), or complement thereof, within a biological sample comprises a nucleotide sequence comprising a thymine at a position corresponding to position 65,099 according to SEQ ID NO:4, a uracil at a position corresponding to position 642 according to SEQ ID NO:30, a uracil at a position corresponding to position 545 according to SEQ ID NO:31, a uracil at a position corresponding to position 598 according to SEQ ID NO:32, a uracil at a position corresponding to position 545 according to SEQ ID NO:33, a uracil at a position corresponding to position 583 according to SEQ ID NO:34, a uracil at a position corresponding to position 943 according to SEQ ID NO:35, a uracil at a position corresponding to position 405 according to SEQ ID NO:36, a thymine at a position corresponding to position 642 according to SEQ ID NO:73, a thymine at a position corresponding to position 545 according to SEQ ID NO:74, a thymine at a position corresponding to position 598 according to SEQ ID NO:75, a thymine at a position corresponding to position 545 according to SEQ ID NO:76, a thymine at a position corresponding to position 583 according to SEQ ID NO:77, a thymine at a position corresponding to position 943 according to SEQ ID NO:78, or a thymine at a position corresponding to position 405 according to SEQ ID NO:79, the biological sample can be subjected to an amplification method using a primer pair that includes a first primer derived from the 5′ flanking sequence adjacent to a thymine at a position corresponding to position 65,099 according to SEQ ID NO:4, a uracil at a position corresponding to position 642 according to SEQ ID NO:30, a uracil at a position corresponding to position 545 according to SEQ ID NO:31, a uracil at a position corresponding to position 598 according to SEQ ID NO:32, a uracil at a position corresponding to position 545 according to SEQ ID NO:33, a uracil at a position corresponding to position 583 according to SEQ ID NO:34, a uracil at a position corresponding to position 943 according to SEQ ID NO:35, a uracil at a position corresponding to position 405 according to SEQ ID NO:36, a thymine at a position corresponding to position 642 according to SEQ ID NO:73, a thymine at a position corresponding to position 545 according to SEQ ID NO:74, a thymine at a position corresponding to position 598 according to SEQ ID NO:75, a thymine at a position corresponding to position 545 according to SEQ ID NO:76, a thymine at a position corresponding to position 583 according to SEQ ID NO:77, a thymine at a position corresponding to position 943 according to SEQ ID NO:78, or a thymine at a position corresponding to position 405 according to SEQ ID NO:79, and a second primer derived from the 3′ flanking sequence adjacent to a thymine at a position corresponding to position 65,099 according to SEQ ID NO:4, a uracil at a position corresponding to position 642 according to SEQ ID NO:30, a uracil at a position corresponding to position 545 according to SEQ ID NO:31, a uracil at a position corresponding to position 598 according to SEQ ID NO:32, a uracil at a position corresponding to position 545 according to SEQ ID NO:33, a uracil at a position corresponding to position 583 according to SEQ ID NO:34, a uracil at a position corresponding to position 943 according to SEQ ID NO:35, a uracil at a position corresponding to position 405 according to SEQ ID NO:36, a thymine at a position corresponding to position 642 according to SEQ ID NO:73, a thymine at a position corresponding to position 545 according to SEQ ID NO:74, a thymine at a position corresponding to position 598 according to SEQ ID NO:75, a thymine at a position corresponding to position 545 according to SEQ ID NO:76, a thymine at a position corresponding to position 583 according to SEQ ID NO:77, a thymine at a position corresponding to position 943 according to SEQ ID NO:78, or a thymine at a position corresponding to position 405 according to SEQ ID NO:79, to produce an amplicon that is indicative of the presence of the SNP at positions encoding a thymine at a position corresponding to position 65,099 according to SEQ ID NO:4, a uracil at a position corresponding to position 642 according to SEQ ID NO:30, a uracil at a position corresponding to position 545 according to SEQ ID NO:31, a uracil at a position corresponding to position 598 according to SEQ ID NO:32, a uracil at a position corresponding to position 545 according to SEQ ID NO:33, a uracil at a position corresponding to position 583 according to SEQ ID NO:34, a uracil at a position corresponding to position 943 according to SEQ ID NO:35, a uracil at a position corresponding to position 405 according to SEQ ID NO:36, a thymine at a position corresponding to position 642 according to SEQ ID NO:73, a thymine at a position corresponding to position 545 according to SEQ ID NO:74, a thymine at a position corresponding to position 598 according to SEQ ID NO:75, a thymine at a position corresponding to position 545 according to SEQ ID NO:76, a thymine at a position corresponding to position 583 according to SEQ ID NO:77, a thymine at a position corresponding to position 943 according to SEQ ID NO:78, or a thymine at a position corresponding to position 405 according to SEQ ID NO:79. In some embodiments, the amplicon may range in length from the combined length of the primer pairs plus one nucleotide base pair to any length of amplicon producible by a DNA amplification protocol. This distance can range from one nucleotide base pair up to the limits of the amplification reaction, or about twenty thousand nucleotide base pairs. Optionally, the primer pair flanks a region including positions comprising a thymine at a position corresponding to position 65,099 according to SEQ ID NO:4, a uracil at a position corresponding to position 642 according to SEQ ID NO:30, a uracil at a position corresponding to position 545 according to SEQ ID NO:31, a uracil at a position corresponding to position 598 according to SEQ ID NO:32, a uracil at a position corresponding to position 545 according to SEQ ID NO:33, a uracil at a position corresponding to position 583 according to SEQ ID NO:34, a uracil at a position corresponding to position 943 according to SEQ ID NO:35, a uracil at a position corresponding to position 405 according to SEQ ID NO:36, a thymine at a position corresponding to position 642 according to SEQ ID NO:73, a thymine at a position corresponding to position 545 according to SEQ ID NO:74, a thymine at a position corresponding to position 598 according to SEQ ID NO:75, a thymine at a position corresponding to position 545 according to SEQ ID NO:76, a thymine at a position corresponding to position 583 according to SEQ ID NO:77, a thymine at a position corresponding to position 943 according to SEQ ID NO:78, or a thymine at a position corresponding to position 405 according to SEQ ID NO:79, and at least 1, 2, 3, 4, 5, 6, 7, 8, 9, 10, or more nucleotides on each side of positions comprising a thymine at a position corresponding to position 65,099 according to SEQ ID NO:4, a uracil at a position corresponding to position 642 according to SEQ ID NO:30, a uracil at a position corresponding to position 545 according to SEQ ID NO:31, a uracil at a position corresponding to position 598 according to SEQ ID NO:32, a uracil at a position corresponding to position 545 according to SEQ ID NO:33, a uracil at a position corresponding to position 583 according to SEQ ID NO:34, a uracil at a position corresponding to position 943 according to SEQ ID NO:35, a uracil at a position corresponding to position 405 according to SEQ ID NO:36, a thymine at a position corresponding to position 642 according to SEQ ID NO:73, a thymine at a position corresponding to position 545 according to SEQ ID NO:74, a thymine at a position corresponding to position 598 according to SEQ ID NO:75, a thymine at a position corresponding to position 545 according to SEQ ID NO:76, a thymine at a position corresponding to position 583 according to SEQ ID NO:77, a thymine at a position corresponding to position 943 according to SEQ ID NO:78, or a thymine at a position corresponding to position 405 according to SEQ ID NO:79.

[0150] In some embodiments, to determine whether a WNT5B nucleic acid molecule (genomic nucleic acid molecule, mRNA molecule, or cDNA molecule), or complement thereof, within a biological sample comprises a nucleotide sequence comprising an adenine at a position corresponding to position 65,099 according to SEQ ID NO:5, an adenine at a position corresponding to position 642 according to SEQ ID NO:37, an adenine at a position corresponding to position 545 according to SEQ ID NO:38, an adenine at a position corresponding to position 598 according to SEQ ID NO:39, an adenine at a position corresponding to position 545 according to SEQ ID NO:40, an adenine at a position corresponding to position 583 according to SEQ ID NO:41, an adenine at a position corresponding to position 943 according to SEQ ID NO:42, an adenine at a position corresponding to position 405 according to SEQ ID NO:43, an adenine at a position corresponding to position 642 according to SEQ ID NO:80, an adenine at a position corresponding to position 545 according to SEQ ID NO:81, an adenine at a position corresponding to position 598 according to SEQ ID NO:82, an adenine at a position corresponding to position 545 according to SEQ ID NO:83, an adenine at a position corresponding to position 583 according to SEQ ID NO:84, an adenine at a position corresponding to position 943 according to SEQ ID NO:85, or an adenine at a position corresponding to position 405 according to SEQ ID NO:86, the biological sample can be subjected to an amplification method using a primer pair that includes a first primer derived from the 5′ flanking sequence adjacent to an adenine at a position corresponding to position 65,099 according to SEQ ID NO:5, an adenine at a position corresponding to position 642 according to SEQ ID NO:37, an adenine at a position corresponding to position 545 according to SEQ ID NO:38, an adenine at a position corresponding to position 598 according to SEQ ID NO:39, an adenine at a position corresponding to position 545 according to SEQ ID NO:40, an adenine at a position corresponding to position 583 according to SEQ ID NO:41, an adenine at a position corresponding to position 943 according to SEQ ID NO:42, an adenine at a position corresponding to position 405 according to SEQ ID NO:43, an adenine at a position corresponding to position 642 according to SEQ ID NO:80, an adenine at a position corresponding to position 545 according to SEQ ID NO:81, an adenine at a position corresponding to position 598 according to SEQ ID NO:82, an adenine at a position corresponding to position 545 according to SEQ ID NO:83, an adenine at a position corresponding to position 583 according to SEQ ID NO:84, an adenine at a position corresponding to position 943 according to SEQ ID NO:85, or an adenine at a position corresponding to position 405 according to SEQ ID NO:86, and a second primer derived from the 3′ flanking sequence adjacent to an adenine at a position corresponding to position 65,099 according to SEQ ID NO:5, an adenine at a position corresponding to position 642 according to SEQ ID NO:37, an adenine at a position corresponding to position 545 according to SEQ ID NO:38, an adenine at a position corresponding to position 598 according to SEQ ID NO:39, an adenine at a position corresponding to position 545 according to SEQ ID NO:40, an adenine at a position corresponding to position 583 according to SEQ ID NO:41, an adenine at a position corresponding to position 943 according to SEQ ID NO:42, an adenine at a position corresponding to position 405 according to SEQ ID NO:43, an adenine at a position corresponding to position 642 according to SEQ ID NO:80, an adenine at a position corresponding to position 545 according to SEQ ID NO:81, an adenine at a position corresponding to position 598 according to SEQ ID NO:82, an adenine at a position corresponding to position 545 according to SEQ ID NO:83, an adenine at a position corresponding to position 583 according to SEQ ID NO:84, an adenine at a position corresponding to position 943 according to SEQ ID NO:85, or an adenine at a position corresponding to position 405 according to SEQ ID NO:86, to produce an amplicon that is indicative of the presence of the SNP at positions encoding an adenine at a position corresponding to position 65,099 according to SEQ ID NO:5, an adenine at a position corresponding to position 642 according to SEQ ID NO:37, an adenine at a position corresponding to position 545 according to SEQ ID NO:38, an adenine at a position corresponding to position 598 according to SEQ ID NO:39, an adenine at a position corresponding to position 545 according to SEQ ID NO:40, an adenine at a position corresponding to position 583 according to SEQ ID NO:41, an adenine at a position corresponding to position 943 according to SEQ ID NO:42, an adenine at a position corresponding to position 405 according to SEQ ID NO:43, an adenine at a position corresponding to position 642 according to SEQ ID NO:80, an adenine at a position corresponding to position 545 according to SEQ ID NO:81, an adenine at a position corresponding to position 598 according to SEQ ID NO:82, an adenine at a position corresponding to position 545 according to SEQ ID NO:83, an adenine at a position corresponding to position 583 according to SEQ ID NO:84, an adenine at a position corresponding to position 943 according to SEQ ID NO:85, or an adenine at a position corresponding to position 405 according to SEQ ID NO:86. In some embodiments, the amplicon may range in length from the combined length of the primer pairs plus one nucleotide base pair to any length of amplicon producible by a DNA amplification protocol. This distance can range from one nucleotide base pair up to the limits of the amplification reaction, or about twenty thousand nucleotide base pairs. Optionally, the primer pair flanks a region including positions comprising an adenine at a position corresponding to position 65,099 according to SEQ ID NO:5, an adenine at a position corresponding to position 642 according to SEQ ID NO:37, an adenine at a position corresponding to position 545 according to SEQ ID NO:38, an adenine at a position corresponding to position 598 according to SEQ ID NO:39, an adenine at a position corresponding to position 545 according to SEQ ID NO:40, an adenine at a position corresponding to position 583 according to SEQ ID NO:41, an adenine at a position corresponding to position 943 according to SEQ ID NO:42, an adenine at a position corresponding to position 405 according to SEQ ID NO:43, an adenine at a position corresponding to position 642 according to SEQ ID NO:80, an adenine at a position corresponding to position 545 according to SEQ ID NO:81, an adenine at a position corresponding to position 598 according to SEQ ID NO:82, an adenine at a position corresponding to position 545 according to SEQ ID NO:83, an adenine at a position corresponding to position 583 according to SEQ ID NO:84, an adenine at a position corresponding to position 943 according to SEQ ID NO:85, or an adenine at a position corresponding to position 405 according to SEQ ID NO:86, and at least 1, 2, 3, 4, 5, 6, 7, 8, 9, 10, or more nucleotides on each side of positions comprising an adenine at a position corresponding to position 65,099 according to SEQ ID NO:5, an adenine at a position corresponding to position 642 according to SEQ ID NO:37, an adenine at a position corresponding to position 545 according to SEQ ID NO:38, an adenine at a position corresponding to position 598 according to SEQ ID NO:39, an adenine at a position corresponding to position 545 according to SEQ ID NO:40, an adenine at a position corresponding to position 583 according to SEQ ID NO:41, an adenine at a position corresponding to position 943 according to SEQ ID NO:42, an adenine at a position corresponding to position 405 according to SEQ ID NO:43, an adenine at a position corresponding to position 642 according to SEQ ID NO:80, an adenine at a position corresponding to position 545 according to SEQ ID NO:81, an adenine at a position corresponding to position 598 according to SEQ ID NO:82, an adenine at a position corresponding to position 545 according to SEQ ID NO:83, an adenine at a position corresponding to position 583 according to SEQ ID NO:84, an adenine at a position corresponding to position 943 according to SEQ ID NO:85, or an adenine at a position corresponding to position 405 according to SEQ ID NO:86.

[0151] In some embodiments, to determine whether a WNT5B nucleic acid molecule (genomic nucleic acid molecule, mRNA molecule, or cDNA molecule), or complement thereof, within a biological sample comprises a nucleotide sequence comprising a deletion of a TC dinucleotide at positions corresponding to positions 71,313-71,314 according to SEQ ID NO:6, a deletion of a UC dinucleotide at positions corresponding to positions 1,039-1,040 according to SEQ ID NO:44, a deletion of a UC dinucleotide at positions corresponding to positions 942-943 according to SEQ ID NO:45, a deletion of a UC dinucleotide at positions corresponding to positions 995-996 according to SEQ ID NO:46, a deletion of a UC dinucleotide at positions corresponding to positions 942-943 according to SEQ ID NO:47, a deletion of a UC dinucleotide at positions corresponding to positions 980-981 according to SEQ ID NO:48, a deletion of a UC dinucleotide at positions corresponding to positions 802-803 according to SEQ ID NO:49, a deletion of a TC dinucleotide at positions corresponding to positions 1,039-1,040 according to SEQ ID NO:87, a deletion of a TC dinucleotide at positions corresponding to positions 942-943 according to SEQ ID NO:88, a deletion of a TC dinucleotide at positions corresponding to positions 995-996 according to SEQ ID NO:89, a deletion of a TC dinucleotide at positions corresponding to positions 942-943 according to SEQ ID NO:90, a deletion of a TC dinucleotide at positions corresponding to positions 980-981 according to SEQ ID NO:91, or a deletion of a TC dinucleotide at positions corresponding to positions 802-803 according to SEQ ID NO:92, the biological sample can be subjected to an amplification method using a primer pair that includes a first primer derived from the 5′ flanking sequence adjacent to a deletion of a TC dinucleotide at positions corresponding to positions 71,313-71,314 according to SEQ ID NO:6, a deletion of a UC dinucleotide at positions corresponding to positions 1,039-1,040 according to SEQ ID NO:44, a deletion of a UC dinucleotide at positions corresponding to positions 942-943 according to SEQ ID NO:45, a deletion of a UC dinucleotide at positions corresponding to positions 995-996 according to SEQ ID NO:46, a deletion of a UC dinucleotide at positions corresponding to positions 942-943 according to SEQ ID NO:47, a deletion of a UC dinucleotide at positions corresponding to positions 980-981 according to SEQ ID NO:48, a deletion of a UC dinucleotide at positions corresponding to positions 802-803 according to SEQ ID NO:49, a deletion of a TC dinucleotide at positions corresponding to positions 1,039-1,040 according to SEQ ID NO:87, a deletion of a TC dinucleotide at positions corresponding to positions 942-943 according to SEQ ID NO:88, a deletion of a TC dinucleotide at positions corresponding to positions 995-996 according to SEQ ID NO:89, a deletion of a TC dinucleotide at positions corresponding to positions 942-943 according to SEQ ID NO:90, a deletion of a TC dinucleotide at positions corresponding to positions 980-981 according to SEQ ID NO:91, or a deletion of a TC dinucleotide at positions corresponding to positions 802-803 according to SEQ ID NO:92, and a second primer derived from the 3′ flanking sequence adjacent to a deletion of a TC dinucleotide at positions corresponding to positions 71,313-71,314 according to SEQ ID NO:6, a deletion of a UC dinucleotide at positions corresponding to positions 1,039-1,040 according to SEQ ID NO:44, a deletion of a UC dinucleotide at positions corresponding to positions 942-943 according to SEQ ID NO:45, a deletion of a UC dinucleotide at positions corresponding to positions 995-996 according to SEQ ID NO:46, a deletion of a UC dinucleotide at positions corresponding to positions 942-943 according to SEQ ID NO:47, a deletion of a UC dinucleotide at positions corresponding to positions 980-981 according to SEQ ID NO:48, a deletion of a UC dinucleotide at positions corresponding to positions 802-803 according to SEQ ID NO:49, a deletion of a TC dinucleotide at positions corresponding to positions 1,039-1,040 according to SEQ ID NO:87, a deletion of a TC dinucleotide at positions corresponding to positions 942-943 according to SEQ ID NO:88, a deletion of a TC dinucleotide at positions corresponding to positions 995-996 according to SEQ ID NO:89, a deletion of a TC dinucleotide at positions corresponding to positions 942-943 according to SEQ ID NO:90, a deletion of a TC dinucleotide at positions corresponding to positions 980-981 according to SEQ ID NO:91, or a deletion of a TC dinucleotide at positions corresponding to positions 802-803 according to SEQ ID NO:92, to produce an amplicon that is indicative of the presence of the SNP at positions encoding a deletion of a TC dinucleotide at positions corresponding to positions 71,313-71,314 according to SEQ ID NO:6, a deletion of a UC dinucleotide at positions corresponding to positions 1,039-1,040 according to SEQ ID NO:44, a deletion of a UC dinucleotide at positions corresponding to positions 942-943 according to SEQ ID NO:45, a deletion of a UC dinucleotide at positions corresponding to positions 995-996 according to SEQ ID NO:46, a deletion of a UC dinucleotide at positions corresponding to positions 942-943 according to SEQ ID NO:47, a deletion of a UC dinucleotide at positions corresponding to positions 980-981 according to SEQ ID NO:48, a deletion of a UC dinucleotide at positions corresponding to positions 802-803 according to SEQ ID NO:49, a deletion of a TC dinucleotide at positions corresponding to positions 1,039-1,040 according to SEQ ID NO:87, a deletion of a TC dinucleotide at positions corresponding to positions 942-943 according to SEQ ID NO:88, a deletion of a TC dinucleotide at positions corresponding to positions 995-996 according to SEQ ID NO:89, a deletion of a TC dinucleotide at positions corresponding to positions 942-943 according to SEQ ID NO:90, a deletion of a TC dinucleotide at positions corresponding to positions 980-981 according to SEQ ID NO:91, or a deletion of a TC dinucleotide at positions corresponding to positions 802-803 according to SEQ ID NO:92. In some embodiments, the amplicon may range in length from the combined length of the primer pairs plus one nucleotide base pair to any length of amplicon producible by a DNA amplification protocol. This distance can range from one nucleotide base pair up to the limits of the amplification reaction, or about twenty thousand nucleotide base pairs. Optionally, the primer pair flanks a region including positions comprising a deletion of a TC dinucleotide at positions corresponding to positions 71,313-71,314 according to SEQ ID NO:6, a deletion of a UC dinucleotide at positions corresponding to positions 1,039-1,040 according to SEQ ID NO:44, a deletion of a UC dinucleotide at positions corresponding to positions 942-943 according to SEQ ID NO:45, a deletion of a UC dinucleotide at positions corresponding to positions 995-996 according to SEQ ID NO:46, a deletion of a UC dinucleotide at positions corresponding to positions 942-943 according to SEQ ID NO:47, a deletion of a UC dinucleotide at positions corresponding to positions 980-981 according to SEQ ID NO:48, a deletion of a UC dinucleotide at positions corresponding to positions 802-803 according to SEQ ID NO:49, a deletion of a TC dinucleotide at positions corresponding to positions 1,039-1,040 according to SEQ ID NO:87, a deletion of a TC dinucleotide at positions corresponding to positions 942-943 according to SEQ ID NO:88, a deletion of a TC dinucleotide at positions corresponding to positions 995-996 according to SEQ ID NO:89, a deletion of a TC dinucleotide at positions corresponding to positions 942-943 according to SEQ ID NO:90, a deletion of a TC dinucleotide at positions corresponding to positions 980-981 according to SEQ ID NO:91, or a deletion of a TC dinucleotide at positions corresponding to positions 802-803 according to SEQ ID NO:92, and at least 1, 2, 3, 4, 5, 6, 7, 8, 9, 10, or more nucleotides on each side of positions comprising a deletion of a TC dinucleotide at positions corresponding to positions 71,313-71,314 according to SEQ ID NO:6, a deletion of a UC dinucleotide at positions corresponding to positions 1,039-1,040 according to SEQ ID NO:44, a deletion of a UC dinucleotide at positions corresponding to positions 942-943 according to SEQ ID NO:45, a deletion of a UC dinucleotide at positions corresponding to positions 995-996 according to SEQ ID NO:46, a deletion of a UC dinucleotide at positions corresponding to positions 942-943 according to SEQ ID NO:47, a deletion of a UC dinucleotide at positions corresponding to positions 980-981 according to SEQ ID NO:48, a deletion of a UC dinucleotide at positions corresponding to positions 802-803 according to SEQ ID NO:49, a deletion of a TC dinucleotide at positions corresponding to positions 1,039-1,040 according to SEQ ID NO:87, a deletion of a TC dinucleotide at positions corresponding to positions 942-943 according to SEQ ID NO:88, a deletion of a TC dinucleotide at positions corresponding to positions 995-996 according to SEQ ID NO:89, a deletion of a TC dinucleotide at positions corresponding to positions 942-943 according to SEQ ID NO:90, a deletion of a TC dinucleotide at positions corresponding to positions 980-981 according to SEQ ID NO:91, or a deletion of a TC dinucleotide at positions corresponding to positions 802-803 according to SEQ ID NO:92, or a deletion of a TC dinucleotide at a position corresponding to position.

[0152] Similar amplicons can be generated from the mRNA and/or cDNA sequences. PCR primer pairs can be derived from a known sequence, for example, by using computer programs intended for that purpose, such as the PCR primer analysis tool in Vector NTI version 10 (Informax Inc., Bethesda Md.); PrimerSelect (DNASTAR Inc., Madison, Wis.); and Primer3 (Version 0.4.0.COPYRGT., 1991, Whitehead Institute for Biomedical Research, Cambridge, Mass.). Additionally, the sequence can be visually scanned and primers manually identified using known guidelines.

[0153] Illustrative examples of nucleic acid sequencing techniques include, but are not limited to, chain terminator (Sanger) sequencing and dye terminator sequencing. Other methods involve nucleic acid hybridization methods other than sequencing, including using labeled primers or probes directed against purified DNA, amplified DNA, and fixed cell preparations (fluorescence in situ hybridization (FISH)). In some methods, a target nucleic acid molecule may be amplified prior to or simultaneous with detection. Illustrative examples of nucleic acid amplification techniques include, but are not limited to, polymerase chain reaction (PCR), ligase chain reaction (LCR), strand displacement amplification (SDA), and nucleic acid sequence based amplification (NASBA). Other methods include, but are not limited to, ligase chain reaction, strand displacement amplification, and thermophilic SDA (tSDA).

[0154] In hybridization techniques, stringent conditions can be employed such that a probe or primer will specifically hybridize to its target. In some embodiments, a polynucleotide primer or probe under stringent conditions will hybridize to its target sequence to a detectably greater degree than to other non-target sequences, such as, at least 2-fold, at least 3-fold, at least 4-fold, or more over background, including over 10-fold over background. In some embodiments, a polynucleotide primer or probe under stringent conditions will hybridize to its target nucleotide sequence to a detectably greater degree than to other nucleotide sequences by at least 2-fold. In some embodiments, a polynucleotide primer or probe under stringent conditions will hybridize to its target nucleotide sequence to a detectably greater degree than to other nucleotide sequences by at least 3-fold. In some embodiments, a polynucleotide primer or probe under stringent conditions will hybridize to its target nucleotide sequence to a detectably greater degree than to other nucleotide sequences by at least 4-fold. In some embodiments, a polynucleotide primer or probe under stringent conditions will hybridize to its target nucleotide sequence to a detectably greater degree than to other nucleotide sequences by over 10-fold over background. Stringent conditions are sequence-dependent and will be different in different circumstances.

[0155] Appropriate stringency conditions which promote DNA hybridization, for example, 6× sodium chloride/sodium citrate (SSC) at about 45° C., followed by a wash of 2×SSC at 50° C., are known or can be found in Current Protocols in Molecular Biology, John Wiley & Sons, N.Y. (1989), 6.3.1-6.3.6. Typically, stringent conditions for hybridization and detection will be those in which the salt concentration is less than about 1.5 M Na⁺ ion, typically about 0.01 to 1.0 M Na⁺ ion concentration (or other salts) at pH 7.0 to 8.3 and the temperature is at least about 30° C. for short probes (such as, for example, 10 to 50 nucleotides) and at least about 60° C. for longer probes (such as, for example, greater than 50 nucleotides). Stringent conditions may also be achieved with the addition of destabilizing agents such as formamide. Optionally, wash buffers may comprise about 0.1% to about 1% SDS. Duration of hybridization is generally less than about 24 hours, usually about 4 to about 12 hours. The duration of the wash time will be at least a length of time sufficient to reach equilibrium.

[0156] The present disclosure also provides methods of detecting the presence of a WNT5B predicted loss-of-function polypeptide comprising performing an assay on a biological sample obtained from the subject to determine whether a WNT5B polypeptide in the biological sample contains one or more variations that causes the polypeptide to have a loss-of-function (partial or complete) or predicted loss-of-function (partial or complete). The WNT5B predicted loss-of-function polypeptide can be any of the WNT5B predicted loss-of-function polypeptides described herein. In some embodiments, the methods detect the presence of WNT5B Cys83Stop-LG, Cys83Stop-Sht, Cys114Stop, Arg134Cys-LG, Arg134Cys-Sht, Arg134Ser-LG, Arg134Ser-Sht, or Val266fs.

[0157] In some embodiments, the methods comprise performing an assay on a biological sample obtained from a subject to determine whether a WNT5B polypeptide in the biological sample comprises a truncation at a position corresponding to position 83 according to SEQ ID NO:96, a truncation at a position corresponding to position 83 according to SEQ ID NO:97, or a truncation at a position corresponding to position 113 according to SEQ ID NO:98. In some embodiments, the methods comprise performing an assay on a biological sample obtained from a subject to determine whether a WNT5B polypeptide in the biological sample comprises a cysteine at a position corresponding to position 134 according to SEQ ID NO:99, or a cysteine at a position corresponding to position 134 according to SEQ ID NO:100. In some embodiments, the methods comprise performing an assay on a biological sample obtained from a subject to determine whether a WNT5B polypeptide in the biological sample comprises a serine at a position corresponding to position 134 according to SEQ ID NO:101, or a serine at a position corresponding to position 134 according to SEQ ID NO:102. In some embodiments, the methods comprise performing an assay on a biological sample obtained from a subject to determine whether a WNT5B polypeptide in the biological sample comprises a frameshift mutation at a position corresponding to position 266 according to SEQ ID NO:103.

[0158] In some embodiments, the detecting step comprises sequencing at least a portion of the WNT5B polypeptide that comprises a position corresponding to: position 83 according to SEQ ID NO:96, position 83 according to SEQ ID NO:97, or position 113 according to SEQ ID NO:98, or SEQ ID NO:93, SEQ ID NO:94, or SEQ ID NO:95. In some embodiments, the detecting step comprises sequencing at least a portion of the WNT5B polypeptide that comprises a position corresponding to: position 134 according to SEQ ID NO:99, or position 134 according to SEQ ID NO:100, position, or SEQ ID NO:93 or SEQ ID NO:95. In some embodiments, the detecting step comprises sequencing at least a portion of the WNT5B polypeptide that comprises a position corresponding to: position 134 according to SEQ ID NO:101, or position 134 according to SEQ ID NO:102, or SEQ ID NO:93, or SEQ ID NO:95. In some embodiments, the detecting step comprises sequencing at least a portion of the WNT5B polypeptide that comprises a position corresponding to: position 266 according to SEQ ID NO:103, or SEQ ID NO:93.

[0159] In some embodiments, the detecting step comprises an immunoassay for detecting the presence of a WNT5B polypeptide that comprises a position corresponding to: position 83 according to SEQ ID NO:96, position 83 according to SEQ ID NO:97, or position 113 according to SEQ ID NO:98, or SEQ ID NO:93, SEQ ID NO:94, or SEQ ID NO:95. In some embodiments, the detecting step comprises an immunoassay for detecting the presence of a WNT5B polypeptide that comprises a position corresponding to: position 134 according to SEQ ID NO:99, or position 134 according to SEQ ID NO:100, or SEQ ID NO:93, or SEQ ID NO:95. In some embodiments, the detecting step comprises an immunoassay for detecting the presence of a WNT5B polypeptide that comprises a position corresponding to: position 134 according to SEQ ID NO:101, or position 134 according to SEQ ID NO:102, or SEQ ID NO:93, or SEQ ID NO:95. In some embodiments, the detecting step comprises an immunoassay for detecting the presence of a WNT5B polypeptide that comprises a position corresponding to: position 266 according to SEQ ID NO:103, or SEQ ID NO:93.

[0160] In some embodiments, when the subject does not have a WNT5B predicted loss-of-function polypeptide, the subject has an increased risk of developing decreased bone mineral density or any of osteopenia, Type I osteoporosis, Type II osteoporosis, and secondary osteoporosis. In some embodiments, when the subject has a WNT5B predicted loss-of-function polypeptide, the subject has a decreased risk of developing decreased bone mineral density or any of osteopenia, Type I osteoporosis, Type II osteoporosis, and secondary osteoporosis.

[0161] The present disclosure also provides isolated nucleic acid molecules that hybridize to WNT5B variant genomic nucleic acid molecules, WNT5B variant mRNA molecules, and/or WNT5B variant cDNA molecules (such as any of the genomic variant nucleic acid molecules, mRNA variant molecules, and cDNA variant molecules disclosed herein). In some embodiments, such isolated nucleic acid molecules hybridize to WNT5B variant nucleic acid molecules under stringent conditions. Such nucleic acid molecules can be used, for example, as probes, primers, alteration-specific probes, or alteration-specific primers as described or exemplified herein.

[0162] In some embodiments, the isolated nucleic acid molecules hybridize to a portion of the WNT5B nucleic acid molecule that includes a position corresponding to: position 56,698 according to SEQ ID NO:2, position 242 according to SEQ ID NO:15, position 145 according to SEQ ID NO:16, position 198 according to SEQ ID NO:17, position 40 according to SEQ ID NO:18, position 145 according to SEQ ID NO:19, position 183 according to SEQ ID NO:20, position 543 according to SEQ ID NO:21, position 242 according to SEQ ID NO:58, position 145 according to SEQ ID NO:59, position 198 according to SEQ ID NO:60, position 40 according to SEQ ID NO:61, position 145 according to SEQ ID NO:62, position 183 according to SEQ ID NO:63, or position 543 according to SEQ ID NO:64.

[0163] In some embodiments, the isolated nucleic acid molecules hybridize to a portion of the WNT5B nucleic acid molecule that includes a position corresponding to: position 58,170 according to SEQ ID NO:3, position 491 according to SEQ ID NO:22, position 394 according to SEQ ID NO:23, position 447 according to SEQ ID NO:24, position 289 according to SEQ ID NO:25, position 394 according to SEQ ID NO:26, position 432 according to SEQ ID NO:27, position 792 according to SEQ ID NO:28, position 254 according to SEQ ID NO:29, position 491 according to SEQ ID NO:65, position 394 according to SEQ ID NO:66, position 447 according to SEQ ID NO:67, position 289 according to SEQ ID NO:68, position 394 according to SEQ ID NO:69, position 432 according to SEQ ID NO:70, position 792 according to SEQ ID NO:71, or position 254 according to SEQ ID NO:72.

[0164] In some embodiments, the isolated nucleic acid molecules hybridize to a portion of the WNT5B nucleic acid molecule that includes a position corresponding to: position 65,099 according to SEQ ID NO:4, position 642 according to SEQ ID NO:30, position 545 according to SEQ ID NO:31, position 598 according to SEQ ID NO:32, position 642 according to SEQ ID NO:73, position 545 according to SEQ ID NO:74, position 598 according to SEQ ID NO:75, position 545 according to SEQ ID NO:76, position 583 according to SEQ ID NO:77, position 943 according to SEQ ID NO:78, or position 405 according to SEQ ID NO:79.

[0165] In some embodiments, the isolated nucleic acid molecules hybridize to a portion of the WNT5B nucleic acid molecule that includes a position corresponding to: position 65,099 according to SEQ ID NO:5, position 642 according to SEQ ID NO:37, position 545 according to SEQ ID NO:38, position 598 according to SEQ ID NO:39, position 545 according to SEQ ID NO:40, position 583 according to SEQ ID NO:41, position 943 according to SEQ ID NO:42, position 405 according to SEQ ID NO:43, position 642 according to SEQ ID NO:80, position 545 according to SEQ ID NO:81, position 598 according to SEQ ID NO:82, position 545 according to SEQ ID NO:83, position 583 according to SEQ ID NO:84, position 943 according to SEQ ID NO:85, or position 405 according to SEQ ID NO:86.

[0166] In some embodiments, the isolated nucleic acid molecules hybridize to a portion of the WNT5B nucleic acid molecule that includes a position corresponding to: positions 71,313-71,314 according to SEQ ID NO:6, positions 1,039-1,040 according to SEQ ID NO:44, positions 942-943 according to SEQ ID NO:45, positions 995-996 according to SEQ ID NO:46, positions 942-943 according to SEQ ID NO:47, positions 980-981 according to SEQ ID NO:48, positions 802-803 according to SEQ ID NO:49, positions 1,039-1,040 according to SEQ ID NO:87, positions 942-943 according to SEQ ID NO:88, positions 995-996 according to SEQ ID NO:89, positions 942-943 according to SEQ ID NO:90, positions 980-981 according to SEQ ID NO:91, or positions 802-803 according to SEQ ID NO:92.

[0167] In some embodiments, such isolated nucleic acid molecules comprise or consist of at least about 5, at least about 8, at least about 10, at least about 11, at least about 12, at least about 13, at least about 14, at least about 15, at least about 16, at least about 17, at least about 18, at least about 19, at least about 20, at least about 21, at least about 22, at least about 23, at least about 24, at least about 25, at least about 30, at least about 35, at least about 40, at least about 45, at least about 50, at least about 55, at least about 60, at least about 65, at least about 70, at least about 75, at least about 80, at least about 85, at least about 90, at least about 95, at least about 100, at least about 200, at least about 300, at least about 400, at least about 500, at least about 600, at least about 700, at least about 800, at least about 900, at least about 1000, at least about 2000, at least about 3000, at least about 4000, or at least about 5000 nucleotides. In some embodiments, such isolated nucleic acid molecules comprise or consist of at least about 5, at least about 8, at least about 10, at least about 11, at least about 12, at least about 13, at least about 14, at least about 15, at least about 16, at least about 17, at least about 18, at least about 19, at least about 20, at least about 21, at least about 22, at least about 23, at least about 24, or at least about 25 nucleotides. In some embodiments, the isolated nucleic acid molecules comprise or consist of at least about 18 nucleotides. In some embodiments, the isolated nucleic acid molecules comprise or consists of at least about 15 nucleotides. In some embodiments, the isolated nucleic acid molecules consist of or comprise from about 10 to about 35, from about 10 to about 30, from about 10 to about 25, from about 12 to about 30, from about 12 to about 28, from about 12 to about 24, from about 15 to about 30, from about 15 to about 25, from about 18 to about 30, from about 18 to about 25, from about 18 to about 24, or from about 18 to about 22 nucleotides. In some embodiments, the isolated nucleic acid molecules consist of or comprise from about 18 to about 30 nucleotides. In some embodiments, the isolated nucleic acid molecules comprise or consist of at least about 15 nucleotides to at least about 35 nucleotides.

[0168] In some embodiments, the isolated nucleic acid molecules hybridize to at least about 15 contiguous nucleotides of a nucleic acid molecule that is at least about 70%, at least about 75%, at least about 80%, at least about 85%, at least about 90%, at least about 95%, at least about 96%, at least about 97%, at least about 98%, at least about 99%, or 100% identical to WNT5B variant genomic nucleic acid molecules, WNT5B variant mRNA molecules, and/or WNT5B variant cDNA molecules. In some embodiments, the isolated nucleic acid molecules consist of or comprise from about 15 to about 100 nucleotides, or from about 15 to about 35 nucleotides. In some embodiments, the isolated nucleic acid molecules consist of or comprise from about 15 to about 100 nucleotides. In some embodiments, the isolated nucleic acid molecules consist of or comprise from about 15 to about 35 nucleotides.

[0169] In some embodiments, the isolated alteration-specific probes or alteration-specific primers comprise at least about 15 nucleotides, wherein the alteration-specific probe or alteration-specific primer comprises a nucleotide sequence which is complementary to the nucleotide sequence of a portion of a WNT5B nucleic acid molecule encoding a WNT5B predicted loss-of-function polypeptide, or the complement thereof. In some embodiments, the portion comprises a position corresponding to: position 56,698 according to SEQ ID NO:2, or the complement thereof; position 242 according to SEQ ID NO:15, or the complement thereof; position 145 according to SEQ ID NO:16, or the complement thereof; position 198 according to SEQ ID NO:17, or the complement thereof; position 40 according to SEQ ID NO:18, or the complement thereof; position 145 according to SEQ ID NO:19, or the complement thereof; position 183 according to SEQ ID NO:20, or the complement thereof; position 543 according to SEQ ID NO:21, or the complement thereof; position 242 according to SEQ ID NO:58, or the complement thereof; position 145 according to SEQ ID NO:59, or the complement thereof; position 198 according to SEQ ID NO:60, or the complement thereof; position 40 according to SEQ ID NO:61, or the complement thereof; position 145 according to SEQ ID NO:62, or the complement thereof; position 183 according to SEQ ID NO:63, or the complement thereof; or position 543 according to SEQ ID NO:64, or the complement thereof.

[0170] In some embodiments, the isolated alteration-specific probes or alteration-specific primers comprise at least about 15 nucleotides, wherein the alteration-specific probe or alteration-specific primer comprises a nucleotide sequence which is complementary to the nucleotide sequence of a portion of a WNT5B nucleic acid molecule encoding a WNT5B predicted loss-of-function polypeptide, or the complement thereof, wherein the portion comprises a position corresponding to: position 58,170 according to SEQ ID NO:3, or the complement thereof; position 491 according to SEQ ID NO:22, or the complement thereof; position 394 according to SEQ ID NO:23, or the complement thereof; position 447 according to SEQ ID NO:24, or the complement thereof; position 289 according to SEQ ID NO:25, or the complement thereof; position 394 according to SEQ ID NO:26, or the complement thereof; position 432 according to SEQ ID NO:27, or the complement thereof; position 792 according to SEQ ID NO:28, or the complement thereof; position 254 according to SEQ ID NO:29, or the complement thereof; position 491 according to SEQ ID NO:65, or the complement thereof; position 394 according to SEQ ID NO:66, or the complement thereof; position 447 according to SEQ ID NO:67, or the complement thereof; position 289 according to SEQ ID NO:68, or the complement thereof; position 394 according to SEQ ID NO:69, or the complement thereof; position 432 according to SEQ ID NO:70, or the complement thereof; position 792 according to SEQ ID NO:71, or the complement thereof; or position 254 according to SEQ ID NO:72, or the complement thereof. In some embodiments, the portion comprises positions corresponding to: positions 58,168-58,170 according to SEQ ID NO:3, or the complement thereof; positions 489-491 according to SEQ ID NO:22, or the complement thereof; positions 392-394 according to SEQ ID NO:23, or the complement thereof; positions 445-447 according to SEQ ID NO:24, or the complement thereof; positions 287-289 according to SEQ ID NO:25, or the complement thereof; positions 392-394 according to SEQ ID NO:26, or the complement thereof; positions 430-432 according to SEQ ID NO:27, or the complement thereof; positions 790-792 according to SEQ ID NO:28, or the complement thereof; positions 252-254 according to SEQ ID NO:29, or the complement thereof; positions 489-491 according to SEQ ID NO:65, or the complement thereof; positions 392-394 according to SEQ ID NO:66, or the complement thereof; positions 445-447 according to SEQ ID NO:67, or the complement thereof; positions 287-289 according to SEQ ID NO:68, or the complement thereof; positions 392-394 according to SEQ ID NO:69, or the complement thereof; positions 430-432 according to SEQ ID NO:70, or the complement thereof; positions 790-792 according to SEQ ID NO:71, or the complement thereof; or positions 252-254 according to SEQ ID NO:72, or the complement thereof.

[0171] In some embodiments, the isolated alteration-specific probes or alteration-specific primers comprise at least about 15 nucleotides, wherein the alteration-specific probe or alteration-specific primer comprises a nucleotide sequence which is complementary to the nucleotide sequence of a portion of a WNT5B nucleic acid molecule encoding a WNT5B predicted loss-of-function polypeptide, or the complement thereof, wherein the portion comprises a position corresponding to: position 65,099 according to SEQ ID NO:4, or the complement thereof; position 642 according to SEQ ID NO:30, or the complement thereof; position 545 according to SEQ ID NO:31, or the complement thereof; position 598 according to SEQ ID NO:32, or the complement thereof; position 545 according to SEQ ID NO:33, or the complement thereof; position 583 according to SEQ ID NO:34, or the complement thereof; position 943 according to SEQ ID NO:35, or the complement thereof; position 405 according to SEQ ID NO:36, or the complement thereof; position 642 according to SEQ ID NO:73, or the complement thereof; position 545 according to SEQ ID NO:74, or the complement thereof; position 598 according to SEQ ID NO:75, or the complement thereof; position 545 according to SEQ ID NO:76, or the complement thereof; position 583 according to SEQ ID NO:77, or the complement thereof; position 943 according to SEQ ID NO:78, or the complement thereof; or position 405 according to SEQ ID NO:79, or the complement thereof. In some embodiments, the portion comprises positions corresponding to: positions 65,099-65,101 according to SEQ ID NO:4, or the complement thereof; positions 642-644 according to SEQ ID NO:30, or the complement thereof; positions 545-547 according to SEQ ID NO:31, or the complement thereof; positions 598-600 according to SEQ ID NO:32, or the complement thereof; positions 545-547 according to SEQ ID NO:33, or the complement thereof; positions 583-585 according to SEQ ID NO:34, or the complement thereof; positions 943-945 according to SEQ ID NO:35, or the complement thereof; positions 405-407 according to SEQ ID NO:36, or the complement thereof; positions 642-644 according to SEQ ID NO:73, or the complement thereof; positions 545-547 according to SEQ ID NO:74, or the complement thereof; positions 598-600 according to SEQ ID NO:75, or the complement thereof; positions 545-547 according to SEQ ID NO:76, or the complement thereof; positions 583-585 according to SEQ ID NO:77, or the complement thereof; positions 943-945 according to SEQ ID NO:78, or the complement thereof; or positions 405-407 according to SEQ ID NO:79, or the complement thereof.

[0172] In some embodiments, the isolated alteration-specific probes or alteration-specific primers comprise at least about 15 nucleotides, wherein the alteration-specific probe or alteration-specific primer comprises a nucleotide sequence which is complementary to the nucleotide sequence of a portion of a WNT5B nucleic acid molecule encoding a WNT5B predicted loss-of-function polypeptide, or the complement thereof, wherein the portion comprises a position corresponding to: position 65,099 according to SEQ ID NO:5, or the complement thereof; position 642 according to SEQ ID NO:37, or the complement thereof; position 545 according to SEQ ID NO:38, or the complement thereof; position 598 according to SEQ ID NO:39, or the complement thereof; position 545 according to SEQ ID NO:40, or the complement thereof; position 583 according to SEQ ID NO:41, or the complement thereof; position 943 according to SEQ ID NO:42, or the complement thereof; position 405 according to SEQ ID NO:43, or the complement thereof; position 642 according to SEQ ID NO:80, or the complement thereof; position 545 according to SEQ ID NO:81, or the complement thereof; position 598 according to SEQ ID NO:82, or the complement thereof; position 545 according to SEQ ID NO:83, or the complement thereof; position 583 according to SEQ ID NO:84, or the complement thereof; position 943 according to SEQ ID NO:85, or the complement thereof; or position 405 according to SEQ ID NO:86, or the complement thereof. In some embodiments, the portion comprises positions corresponding to: positions 65,099-65,101 according to SEQ ID NO:5, or the complement thereof; positions 642-644 according to SEQ ID NO:37, or the complement thereof; positions 545-547 according to SEQ ID NO:38, or the complement thereof; positions 598-600 according to SEQ ID NO:39, or the complement thereof; positions 545-547 according to SEQ ID NO:40, or the complement thereof; positions 583-585 according to SEQ ID NO:41, or the complement thereof; positions 943-945 according to SEQ ID NO:42, or the complement thereof; positions 405-407 according to SEQ ID NO:43, or the complement thereof; positions 642-644 according to SEQ ID NO:80, or the complement thereof; positions 545-547 according to SEQ ID NO:81, or the complement thereof; positions 598-600 according to SEQ ID NO:82, or the complement thereof; positions 545-547 according to SEQ ID NO:83, or the complement thereof; positions 583-585 according to SEQ ID NO:84, or the complement thereof; positions 943-945 according to SEQ ID NO:85, or the complement thereof; or positions 405-407 according to SEQ ID NO:86, or the complement thereof.

[0173] In some embodiments, the isolated alteration-specific probes or alteration-specific primers comprise at least about 15 nucleotides, wherein the alteration-specific probe or alteration-specific primer comprises a nucleotide sequence which is complementary to the nucleotide sequence of a portion of a WNT5B nucleic acid molecule encoding a WNT5B predicted loss-of-function polypeptide, or the complement thereof, wherein the portion comprises a position corresponding to: positions 71,313-71,314 according to SEQ ID NO:6, or the complement thereof; positions 1,039-1,040 according to SEQ ID NO:44, or the complement thereof; positions 942-943 according to SEQ ID NO:45, or the complement thereof; positions 995-996 according to SEQ ID NO:46, or the complement thereof; positions 942-943 according to SEQ ID NO:47, or the complement thereof; positions 980-981 according to SEQ ID NO:48, or the complement thereof; positions 802-803 according to SEQ ID NO:49, or the complement thereof; positions 1,039-1,040 according to SEQ ID NO:87, or the complement thereof; positions 942-943 according to SEQ ID NO:88, or the complement thereof; positions 995-996 according to SEQ ID NO:89, or the complement thereof; positions 942-943 according to SEQ ID NO:90, or the complement thereof; positions 980-981 according to SEQ ID NO:91, or the complement thereof; or positions 802-803 according to SEQ ID NO:92, or the complement thereof.

[0174] In some embodiments, the alteration-specific probes and alteration-specific primers comprise DNA. In some embodiments, the alteration-specific probes and alteration-specific primers comprise RNA.

[0175] In some embodiments, the probes and primers described herein (including alteration-specific probes and alteration-specific primers) have a nucleotide sequence that specifically hybridizes to any of the nucleic acid molecules disclosed herein, or the complement thereof. In some embodiments, the probes and primers specifically hybridize to any of the nucleic acid molecules disclosed herein under stringent conditions.

[0176] In some embodiments, the primers, including alteration-specific primers, can be used in second generation sequencing or high throughput sequencing. In some instances, the primers, including alteration-specific primers, can be modified. In particular, the primers can comprise various modifications that are used at different steps of, for example, Massive Parallel Signature Sequencing (MPSS), Polony sequencing, and 454 Pyrosequencing. Modified primers can be used at several steps of the process, including biotinylated primers in the cloning step and fluorescently labeled primers used at the bead loading step and detection step. Polony sequencing is generally performed using a paired-end tags library wherein each molecule of DNA template is about 135 bp in length. Biotinylated primers are used at the bead loading step and emulsion PCR. Fluorescently labeled degenerate nonamer oligonucleotides are used at the detection step. An adaptor can contain a 5′-biotin tag for immobilization of the DNA library onto streptavidin-coated beads.

[0177] The probes and primers described herein can be used to detect a nucleotide variation within any of the WNT5B variant genomic nucleic acid molecules, WNT5B variant mRNA molecules, and/or WNT5B variant cDNA molecules disclosed herein. The primers described herein can be used to amplify the WNT5B variant genomic nucleic acid molecules, WNT5B variant mRNA molecules, or WNT5B variant cDNA molecules, or a fragment thereof.

[0178] The present disclosure also provides pairs of primers comprising any of the primers described above. For example, if one of the primers' 3′-ends hybridizes to a cytosine at a position corresponding to position 56,698 according to SEQ ID NO:1 (rather than a thymine) in a particular WNT5B nucleic acid molecule, then the presence of the amplified fragment would indicate the presence of a WNT5B reference genomic nucleic acid molecule. Conversely, if one of the primers' 3′-ends hybridizes to a thymine at a position corresponding to position 56,698 according to SEQ ID NO:2 (rather than a cytosine) in a particular WNT5B nucleic acid molecule, then the presence of the amplified fragment would indicate the presence of the WNT5B variant genomic nucleic acid molecule. In some embodiments, the nucleotide of the primer complementary to the thymine at a position corresponding to position 56,698 according to SEQ ID NO:2 can be at the 3′ end of the primer. In addition, if one of the primers' 3′-ends hybridizes to a cytosine at a position corresponding to position 242 according to SEQ ID NO:7 (rather than a uracil) in a particular WNT5B nucleic acid molecule, then the presence of the amplified fragment would indicate the presence of a WNT5B reference mRNA molecule. Conversely, if one of the primers' 3′-ends hybridizes to a uracil at a position corresponding to position 242 according to SEQ ID NO:15 (rather than a cytosine) in a particular WNT5B mRNA molecule, then the presence of the amplified fragment would indicate the presence of the WNT5B variant mRNA molecule. In some embodiments, the nucleotide of the primer complementary to the uracil at a position corresponding to position 242 according to SEQ ID NO:15 can be at the 3′ end of the primer. In addition, if one of the primers' 3′-ends hybridizes to a cytosine at a position corresponding to position 145 according to SEQ ID NO:8 (rather than a uracil) in a particular WNT5B nucleic acid molecule, then the presence of the amplified fragment would indicate the presence of a WNT5B reference mRNA molecule. Conversely, if one of the primers' 3′-ends hybridizes to a uracil at a position corresponding to position 145 according to SEQ ID NO:16 (rather than a cytosine) in a particular WNT5B mRNA molecule, then the presence of the amplified fragment would indicate the presence of the WNT5B variant mRNA molecule. In some embodiments, the nucleotide of the primer complementary to the uracil at a position corresponding to position 145 according to SEQ ID NO:16 can be at the 3′ end of the primer. In addition, if one of the primers' 3′-ends hybridizes to a cytosine at a position corresponding to position 198 according to SEQ ID NO:9 (rather than a uracil) in a particular WNT5B nucleic acid molecule, then the presence of the amplified fragment would indicate the presence of a WNT5B reference mRNA molecule. Conversely, if one of the primers' 3′-ends hybridizes to a uracil at a position corresponding to position 198 according to SEQ ID NO:17 (rather than a cytosine) in a particular WNT5B mRNA molecule, then the presence of the amplified fragment would indicate the presence of the WNT5B variant mRNA molecule. In some embodiments, the nucleotide of the primer complementary to the uracil at a position corresponding to position 198 according to SEQ ID NO:17 can be at the 3′ end of the primer. In addition, if one of the primers' 3′-ends hybridizes to a cytosine at a position corresponding to position 40 according to SEQ ID NO:10 (rather than a uracil) in a particular WNT5B nucleic acid molecule, then the presence of the amplified fragment would indicate the presence of a WNT5B reference mRNA molecule. Conversely, if one of the primers' 3′-ends hybridizes to a uracil at a position corresponding to position 40 according to SEQ ID NO:18 (rather than a cytosine) in a particular WNT5B mRNA molecule, then the presence of the amplified fragment would indicate the presence of the WNT5B variant mRNA molecule. In some embodiments, the nucleotide of the primer complementary to the uracil at a position corresponding to position 40 according to SEQ ID NO:18 can be at the 3′ end of the primer. In addition, if one of the primers' 3′-ends hybridizes to a cytosine at a position corresponding to position 145 according to SEQ ID NO:11 (rather than a uracil) in a particular WNT5B nucleic acid molecule, then the presence of the amplified fragment would indicate the presence of a WNT5B reference mRNA molecule. Conversely, if one of the primers' 3′-ends hybridizes to a uracil at a position corresponding to position 145 according to SEQ ID NO:19 (rather than a cytosine) in a particular WNT5B mRNA molecule, then the presence of the amplified fragment would indicate the presence of the WNT5B variant mRNA molecule. In some embodiments, the nucleotide of the primer complementary to the uracil at a position corresponding to position 145 according to SEQ ID NO:19 can be at the 3′ end of the primer. In addition, if one of the primers' 3′-ends hybridizes to a cytosine at a position corresponding to position 183 according to SEQ ID NO:12 (rather than a uracil) in a particular WNT5B nucleic acid molecule, then the presence of the amplified fragment would indicate the presence of a WNT5B reference mRNA molecule. Conversely, if one of the primers' 3′-ends hybridizes to a uracil at a position corresponding to position 183 according to SEQ ID NO:20 (rather than a cytosine) in a particular WNT5B mRNA molecule, then the presence of the amplified fragment would indicate the presence of the WNT5B variant mRNA molecule. In some embodiments, the nucleotide of the primer complementary to the uracil at a position corresponding to position 183 according to SEQ ID NO:20 can be at the 3′ end of the primer. In addition, if one of the primers' 3′-ends hybridizes to a cytosine at a position corresponding to position 543 according to SEQ ID NO:13 (rather than a uracil) in a particular WNT5B nucleic acid molecule, then the presence of the amplified fragment would indicate the presence of a WNT5B reference mRNA molecule. Conversely, if one of the primers' 3′-ends hybridizes to a uracil at a position corresponding to position 543 according to SEQ ID NO:21 (rather than a cytosine) in a particular WNT5B mRNA molecule, then the presence of the amplified fragment would indicate the presence of the WNT5B variant mRNA molecule. In some embodiments, the nucleotide of the primer complementary to the uracil at a position corresponding to position 543 according to SEQ ID NO:21 can be at the 3′ end of the primer. In addition, if one of the primers' 3′-ends hybridizes to a cytosine at a position corresponding to position 242 according to SEQ ID NO:50 (rather than a thymine) in a particular WNT5B nucleic acid molecule, then the presence of the amplified fragment would indicate the presence of a WNT5B reference cDNA molecule. Conversely, if one of the primers' 3′-ends hybridizes to a thymine at a position corresponding to position 242 according to SEQ ID NO:58 (rather than a cytosine) in a particular WNT5B cDNA molecule, then the presence of the amplified fragment would indicate the presence of the WNT5B variant cDNA molecule. In some embodiments, the nucleotide of the primer complementary to the thymine at a position corresponding to position 242 according to SEQ ID NO:58 can be at the 3′ end of the primer. In addition, if one of the primers' 3′-ends hybridizes to a cytosine at a position corresponding to position 145 according to SEQ ID NO:51 (rather than a thymine) in a particular WNT5B nucleic acid molecule, then the presence of the amplified fragment would indicate the presence of a WNT5B reference cDNA molecule. Conversely, if one of the primers' 3′-ends hybridizes to a thymine at a position corresponding to position 145 according to SEQ ID NO:59 (rather than a cytosine) in a particular WNT5B cDNA molecule, then the presence of the amplified fragment would indicate the presence of the WNT5B variant cDNA molecule. In some embodiments, the nucleotide of the primer complementary to the thymine at a position corresponding to position 145 according to SEQ ID NO:59 can be at the 3′ end of the primer. In addition, if one of the primers' 3′-ends hybridizes to a cytosine at a position corresponding to position 198 according to SEQ ID NO:52 (rather than a thymine) in a particular WNT5B nucleic acid molecule, then the presence of the amplified fragment would indicate the presence of a WNT5B reference cDNA molecule. Conversely, if one of the primers' 3′-ends hybridizes to a thymine at a position corresponding to position 198 according to SEQ ID NO:60 (rather than a cytosine) in a particular WNT5B cDNA molecule, then the presence of the amplified fragment would indicate the presence of the WNT5B variant cDNA molecule. In some embodiments, the nucleotide of the primer complementary to the thymine at a position corresponding to position 198 according to SEQ ID NO:60 can be at the 3′ end of the primer. In addition, if one of the primers' 3′-ends hybridizes to a cytosine at a position corresponding to position 40 according to SEQ ID NO:50 (rather than a thymine) in a particular WNT5B nucleic acid molecule, then the presence of the amplified fragment would indicate the presence of a WNT5B reference cDNA molecule. Conversely, if one of the primers' 3′-ends hybridizes to a thymine at a position corresponding to position 40 according to SEQ ID NO:61 (rather than a cytosine) in a particular WNT5B cDNA molecule, then the presence of the amplified fragment would indicate the presence of the WNT5B variant cDNA molecule. In some embodiments, the nucleotide of the primer complementary to the thymine at a position corresponding to position 40 according to SEQ ID NO:61 can be at the 3′ end of the primer. In addition, if one of the primers' 3′-ends hybridizes to a cytosine at a position corresponding to position 145 according to SEQ ID NO:54 (rather than a thymine) in a particular WNT5B nucleic acid molecule, then the presence of the amplified fragment would indicate the presence of a WNT5B reference cDNA molecule. Conversely, if one of the primers' 3′-ends hybridizes to a thymine at a position corresponding to position 145 according to SEQ ID NO:62 (rather than a cytosine) in a particular WNT5B cDNA molecule, then the presence of the amplified fragment would indicate the presence of the WNT5B variant cDNA molecule. In some embodiments, the nucleotide of the primer complementary to the thymine at a position corresponding to position 145 according to SEQ ID NO:62 can be at the 3′ end of the primer. In addition, if one of the primers' 3′-ends hybridizes to a cytosine at a position corresponding to position 183 according to SEQ ID NO:55 (rather than a thymine) in a particular WNT5B nucleic acid molecule, then the presence of the amplified fragment would indicate the presence of a WNT5B reference cDNA molecule. Conversely, if one of the primers' 3′-ends hybridizes to a thymine at a position corresponding to position 183 according to SEQ ID NO:63 (rather than a cytosine) in a particular WNT5B cDNA molecule, then the presence of the amplified fragment would indicate the presence of the WNT5B variant cDNA molecule. In some embodiments, the nucleotide of the primer complementary to the thymine at a position corresponding to position 183 according to SEQ ID NO:63 can be at the 3′ end of the primer. In addition, if one of the primers' 3′-ends hybridizes to a cytosine at a position corresponding to position 543 according to SEQ ID NO:56 (rather than a thymine) in a particular WNT5B nucleic acid molecule, then the presence of the amplified fragment would indicate the presence of a WNT5B reference cDNA molecule. Conversely, if one of the primers' 3′-ends hybridizes to a thymine at a position corresponding to position 543 according to SEQ ID NO:64 (rather than a cytosine) in a particular WNT5B cDNA molecule, then the presence of the amplified fragment would indicate the presence of the WNT5B variant cDNA molecule. In some embodiments, the nucleotide of the primer complementary to the thymine at a position corresponding to position 543 according to SEQ ID NO:64 can be at the 3′ end of the primer.

[0179] If one of the primers' 3′-ends hybridizes to a thymine at a position corresponding to position 58,170 according to SEQ ID NO:1 (rather than an adenine) in a particular WNT5B nucleic acid molecule, then the presence of the amplified fragment would indicate the presence of a WNT5B reference genomic nucleic acid molecule. Conversely, if one of the primers' 3′-ends hybridizes to an adenine at a position corresponding to position 58,170 according to SEQ ID NO:3 (rather than a thymine) in a particular WNT5B nucleic acid molecule, then the presence of the amplified fragment would indicate the presence of the WNT5B variant genomic nucleic acid molecule. In some embodiments, the nucleotide of the primer complementary to the adenine at a position corresponding to position 58,170 according to SEQ ID NO:3 can be at the 3′ end of the primer. In addition, if one of the primers' 3′-ends hybridizes to a uracil at a position corresponding to position 491 according to SEQ ID NO:7 (rather than an adenine) in a particular WNT5B nucleic acid molecule, then the presence of the amplified fragment would indicate the presence of a WNT5B reference mRNA molecule. Conversely, if one of the primers' 3′-ends hybridizes to an adenine at a position corresponding to position 491 according to SEQ ID NO:22 (rather than a uracil) in a particular WNT5B mRNA molecule, then the presence of the amplified fragment would indicate the presence of the WNT5B variant mRNA molecule. In some embodiments, the nucleotide of the primer complementary to the adenine at a position corresponding to position 491 according to SEQ ID NO:22 can be at the 3′ end of the primer. In addition, if one of the primers' 3′-ends hybridizes to a uracil at a position corresponding to position 394 according to SEQ ID NO:8 (rather than an adenine) in a particular WNT5B nucleic acid molecule, then the presence of the amplified fragment would indicate the presence of a WNT5B reference mRNA molecule. Conversely, if one of the primers' 3′-ends hybridizes to an adenine at a position corresponding to position 394 according to SEQ ID NO:23 (rather than a uracil) in a particular WNT5B mRNA molecule, then the presence of the amplified fragment would indicate the presence of the WNT5B variant mRNA molecule. In some embodiments, the nucleotide of the primer complementary to the adenine at a position corresponding to position 394 according to SEQ ID NO:23 can be at the 3′ end of the primer. In addition, if one of the primers' 3′-ends hybridizes to a uracil at a position corresponding to position 394 according to SEQ ID NO:9 (rather than an adenine) in a particular WNT5B nucleic acid molecule, then the presence of the amplified fragment would indicate the presence of a WNT5B reference mRNA molecule. Conversely, if one of the primers' 3′-ends hybridizes to an adenine at a position corresponding to position 447 according to SEQ ID NO:24 (rather than a uracil) in a particular WNT5B mRNA molecule, then the presence of the amplified fragment would indicate the presence of the WNT5B variant mRNA molecule. In some embodiments, the nucleotide of the primer complementary to the adenine at a position corresponding to position 447 according to SEQ ID NO:24 can be at the 3′ end of the primer. In addition, if one of the primers' 3′-ends hybridizes to a uracil at a position corresponding to position 289 according to SEQ ID NO:10 (rather than an adenine) in a particular WNT5B nucleic acid molecule, then the presence of the amplified fragment would indicate the presence of a WNT5B reference mRNA molecule. Conversely, if one of the primers' 3′-ends hybridizes to an adenine at a position corresponding to position 289 according to SEQ ID NO:25 (rather than a uracil) in a particular WNT5B mRNA molecule, then the presence of the amplified fragment would indicate the presence of the WNT5B variant mRNA molecule. In some embodiments, the nucleotide of the primer complementary to the adenine at a position corresponding to position 289 according to SEQ ID NO:25 can be at the 3′ end of the primer. In addition, if one of the primers' 3′-ends hybridizes to a uracil at a position corresponding to position 394 according to SEQ ID NO:11 (rather than an adenine) in a particular WNT5B nucleic acid molecule, then the presence of the amplified fragment would indicate the presence of a WNT5B reference mRNA molecule. Conversely, if one of the primers' 3′-ends hybridizes to an adenine at a position corresponding to position 394 according to SEQ ID NO:26 (rather than a uracil) in a particular WNT5B mRNA molecule, then the presence of the amplified fragment would indicate the presence of the WNT5B variant mRNA molecule. In some embodiments, the nucleotide of the primer complementary to the adenine at a position corresponding to position 394 according to SEQ ID NO:26 can be at the 3′ end of the primer. In addition, if one of the primers' 3′-ends hybridizes to a uracil at a position corresponding to position 432 according to SEQ ID NO:12 (rather than an adenine) in a particular WNT5B nucleic acid molecule, then the presence of the amplified fragment would indicate the presence of a WNT5B reference mRNA molecule. Conversely, if one of the primers' 3′-ends hybridizes to an adenine at a position corresponding to position 432 according to SEQ ID NO:27 (rather than a uracil) in a particular WNT5B mRNA molecule, then the presence of the amplified fragment would indicate the presence of the WNT5B variant mRNA molecule. In some embodiments, the nucleotide of the primer complementary to the adenine at a position corresponding to position 432 according to SEQ ID NO:27 can be at the 3′ end of the primer. In addition, if one of the primers' 3′-ends hybridizes to a uracil at a position corresponding to position 792 according to SEQ ID NO:13 (rather than an adenine) in a particular WNT5B nucleic acid molecule, then the presence of the amplified fragment would indicate the presence of a WNT5B reference mRNA molecule. Conversely, if one of the primers' 3′-ends hybridizes to an adenine at a position corresponding to position 792 according to SEQ ID NO:28 (rather than a uracil) in a particular WNT5B mRNA molecule, then the presence of the amplified fragment would indicate the presence of the WNT5B variant mRNA molecule. In some embodiments, the nucleotide of the primer complementary to the adenine at a position corresponding to position 792 according to SEQ ID NO:28 can be at the 3′ end of the primer. In addition, if one of the primers' 3′-ends hybridizes to a uracil at a position corresponding to position 254 according to SEQ ID NO:14 (rather than an adenine) in a particular WNT5B nucleic acid molecule, then the presence of the amplified fragment would indicate the presence of a WNT5B reference mRNA molecule. Conversely, if one of the primers' 3′-ends hybridizes to an adenine at a position corresponding to position 254 according to SEQ ID NO:29 (rather than a uracil) in a particular WNT5B mRNA molecule, then the presence of the amplified fragment would indicate the presence of the WNT5B variant mRNA molecule. In some embodiments, the nucleotide of the primer complementary to the adenine at a position corresponding to position 254 according to SEQ ID NO:29 can be at the 3′ end of the primer. In addition, if one of the primers' 3′-ends hybridizes to a thymine at a position corresponding to position 145 according to SEQ ID NO:50 (rather than an adenine) in a particular WNT5B nucleic acid molecule, then the presence of the amplified fragment would indicate the presence of a WNT5B reference cDNA molecule. Conversely, if one of the primers' 3′-ends hybridizes to an adenine at a position corresponding to position 491 according to SEQ ID NO:65 (rather than a thymine) in a particular WNT5B cDNA molecule, then the presence of the amplified fragment would indicate the presence of the WNT5B variant cDNA molecule. In some embodiments, the nucleotide of the primer complementary to the adenine at a position corresponding to position 491 according to SEQ ID NO:65 can be at the 3′ end of the primer. In addition, if one of the primers' 3′-ends hybridizes to a thymine at a position corresponding to position 491 according to SEQ ID NO:51 (rather than an adenine) in a particular WNT5B nucleic acid molecule, then the presence of the amplified fragment would indicate the presence of a WNT5B reference cDNA molecule. Conversely, if one of the primers' 3′-ends hybridizes to an adenine at a position corresponding to position 394 according to SEQ ID NO:66 (rather than a thymine) in a particular WNT5B cDNA molecule, then the presence of the amplified fragment would indicate the presence of the WNT5B variant cDNA molecule. In some embodiments, the nucleotide of the primer complementary to the adenine at a position corresponding to position 394 according to SEQ ID NO:66 can be at the 3′ end of the primer. In addition, if one of the primers' 3′-ends hybridizes to a thymine at a position corresponding to position 447 according to SEQ ID NO:52 (rather than an adenine) in a particular WNT5B nucleic acid molecule, then the presence of the amplified fragment would indicate the presence of a WNT5B reference cDNA molecule. Conversely, if one of the primers' 3′-ends hybridizes to an adenine at a position corresponding to position 447 according to SEQ ID NO:67 (rather than a thymine) in a particular WNT5B cDNA molecule, then the presence of the amplified fragment would indicate the presence of the WNT5B variant cDNA molecule. In some embodiments, the nucleotide of the primer complementary to the adenine at a position corresponding to position 447 according to SEQ ID NO:67 can be at the 3′ end of the primer. In addition, if one of the primers' 3′-ends hybridizes to a thymine at a position corresponding to position 289 according to SEQ ID NO:50 (rather than an adenine) in a particular WNT5B nucleic acid molecule, then the presence of the amplified fragment would indicate the presence of a WNT5B reference cDNA molecule. Conversely, if one of the primers' 3′-ends hybridizes to an adenine at a position corresponding to position 289 according to SEQ ID NO:68 (rather than a thymine) in a particular WNT5B cDNA molecule, then the presence of the amplified fragment would indicate the presence of the WNT5B variant cDNA molecule. In some embodiments, the nucleotide of the primer complementary to the adenine at a position corresponding to position 289 according to SEQ ID NO:68 can be at the 3′ end of the primer. In addition, if one of the primers' 3′-ends hybridizes to a thymine at a position corresponding to position 394 according to SEQ ID NO:54 (rather than an adenine) in a particular WNT5B nucleic acid molecule, then the presence of the amplified fragment would indicate the presence of a WNT5B reference cDNA molecule. Conversely, if one of the primers' 3′-ends hybridizes to an adenine at a position corresponding to position 394 according to SEQ ID NO:69 (rather than a thymine) in a particular WNT5B cDNA molecule, then the presence of the amplified fragment would indicate the presence of the WNT5B variant cDNA molecule. In some embodiments, the nucleotide of the primer complementary to the adenine at a position corresponding to position 394 according to SEQ ID NO:69 can be at the 3′ end of the primer. In addition, if one of the primers' 3′-ends hybridizes to a thymine at a position corresponding to position 432 according to SEQ ID NO:55 (rather than an adenine) in a particular WNT5B nucleic acid molecule, then the presence of the amplified fragment would indicate the presence of a WNT5B reference cDNA molecule. Conversely, if one of the primers' 3′-ends hybridizes to an adenine at a position corresponding to position 432 according to SEQ ID NO:70 (rather than a thymine) in a particular WNT5B cDNA molecule, then the presence of the amplified fragment would indicate the presence of the WNT5B variant cDNA molecule. In some embodiments, the nucleotide of the primer complementary to the adenine at a position corresponding to position 432 according to SEQ ID NO:70 can be at the 3′ end of the primer. In addition, if one of the primers' 3′-ends hybridizes to a thymine at a position corresponding to position 792 according to SEQ ID NO:56 (rather than an adenine) in a particular WNT5B nucleic acid molecule, then the presence of the amplified fragment would indicate the presence of a WNT5B reference cDNA molecule. Conversely, if one of the primers' 3′-ends hybridizes to an adenine at a position corresponding to position 792 according to SEQ ID NO:71 (rather than a thymine) in a particular WNT5B cDNA molecule, then the presence of the amplified fragment would indicate the presence of the WNT5B variant cDNA molecule. In some embodiments, the nucleotide of the primer complementary to the adenine at a position corresponding to position 792 according to SEQ ID NO:71 can be at the 3′ end of the primer. In addition, if one of the primers' 3′-ends hybridizes to a thymine at a position corresponding to position 254 according to SEQ ID NO:57 (rather than an adenine) in a particular WNT5B nucleic acid molecule, then the presence of the amplified fragment would indicate the presence of a WNT5B reference cDNA molecule. Conversely, if one of the primers' 3′-ends hybridizes to an adenine at a position corresponding to position 254 according to SEQ ID NO:72 (rather than a thymine) in a particular WNT5B cDNA molecule, then the presence of the amplified fragment would indicate the presence of the WNT5B variant cDNA molecule. In some embodiments, the nucleotide of the primer complementary to the adenine at a position corresponding to position 254 according to SEQ ID NO:72 can be at the 3′ end of the primer.

[0180] If one of the primers' 3′-ends hybridizes to a cytosine at a position corresponding to position 65,099 according to SEQ ID NO:1 (rather than a thymine) in a particular WNT5B nucleic acid molecule, then the presence of the amplified fragment would indicate the presence of a WNT5B reference genomic nucleic acid molecule. Conversely, if one of the primers' 3′-ends hybridizes to a thymine at a position corresponding to position 65,099 according to SEQ ID NO:4 (rather than a cytosine) in a particular WNT5B nucleic acid molecule, then the presence of the amplified fragment would indicate the presence of the WNT5B variant genomic nucleic acid molecule. In some embodiments, the nucleotide of the primer complementary to the thymine at a position corresponding to position 65,099 according to SEQ ID NO:4 can be at the 3′ end of the primer. In addition, if one of the primers' 3′-ends hybridizes to a cytosine at a position corresponding to position 642 according to SEQ ID NO:7 (rather than a uracil) in a particular WNT5B nucleic acid molecule, then the presence of the amplified fragment would indicate the presence of a WNT5B reference mRNA molecule. Conversely, if one of the primers' 3′-ends hybridizes to a uracil at a position corresponding to position 642 according to SEQ ID NO:30 (rather than a cytosine) in a particular WNT5B mRNA molecule, then the presence of the amplified fragment would indicate the presence of the WNT5B variant mRNA molecule. In some embodiments, the nucleotide of the primer complementary to the uracil at a position corresponding to position 642 according to SEQ ID NO:30 can be at the 3′ end of the primer. In addition, if one of the primers' 3′-ends hybridizes to a cytosine at a position corresponding to position 545 according to SEQ ID NO:8 (rather than a uracil) in a particular WNT5B nucleic acid molecule, then the presence of the amplified fragment would indicate the presence of a WNT5B reference mRNA molecule. Conversely, if one of the primers' 3′-ends hybridizes to a uracil at a position corresponding to position 545 according to SEQ ID NO:31 (rather than a cytosine) in a particular WNT5B mRNA molecule, then the presence of the amplified fragment would indicate the presence of the WNT5B variant mRNA molecule. In some embodiments, the nucleotide of the primer complementary to the uracil at a position corresponding to position 545 according to SEQ ID NO:31 can be at the 3′ end of the primer. In addition, if one of the primers' 3′-ends hybridizes to a cytosine at a position corresponding to position 598 according to SEQ ID NO:9 (rather than a uracil) in a particular WNT5B nucleic acid molecule, then the presence of the amplified fragment would indicate the presence of a WNT5B reference mRNA molecule. Conversely, if one of the primers' 3′-ends hybridizes to a uracil at a position corresponding to position 598 according to SEQ ID NO:32 (rather than a cytosine) in a particular WNT5B mRNA molecule, then the presence of the amplified fragment would indicate the presence of the WNT5B variant mRNA molecule. In some embodiments, the nucleotide of the primer complementary to the uracil at a position corresponding to position 598 according to SEQ ID NO:32 can be at the 3′ end of the primer. In addition, if one of the primers' 3′-ends hybridizes to a cytosine at a position corresponding to position 545 according to SEQ ID NO:11 (rather than a uracil) in a particular WNT5B nucleic acid molecule, then the presence of the amplified fragment would indicate the presence of a WNT5B reference mRNA molecule. Conversely, if one of the primers' 3′-ends hybridizes to a uracil at a position corresponding to position 545 according to SEQ ID NO:33 (rather than a cytosine) in a particular WNT5B mRNA molecule, then the presence of the amplified fragment would indicate the presence of the WNT5B variant mRNA molecule. In some embodiments, the nucleotide of the primer complementary to the uracil at a position corresponding to position 545 according to SEQ ID NO:33 can be at the 3′ end of the primer. In addition, if one of the primers' 3′-ends hybridizes to a cytosine at a position corresponding to position 583 according to SEQ ID NO:12 (rather than a uracil) in a particular WNT5B nucleic acid molecule, then the presence of the amplified fragment would indicate the presence of a WNT5B reference mRNA molecule. Conversely, if one of the primers' 3′-ends hybridizes to a uracil at a position corresponding to position 583 according to SEQ ID NO:34 (rather than a cytosine) in a particular WNT5B mRNA molecule, then the presence of the amplified fragment would indicate the presence of the WNT5B variant mRNA molecule. In some embodiments, the nucleotide of the primer complementary to the uracil at a position corresponding to position 583 according to SEQ ID NO:34 can be at the 3′ end of the primer. In addition, if one of the primers' 3′-ends hybridizes to a cytosine at a position corresponding to position 943 according to SEQ ID NO:13 (rather than a uracil) in a particular WNT5B nucleic acid molecule, then the presence of the amplified fragment would indicate the presence of a WNT5B reference mRNA molecule. Conversely, if one of the primers' 3′-ends hybridizes to a uracil at a position corresponding to position 943 according to SEQ ID NO:35 (rather than a cytosine) in a particular WNT5B mRNA molecule, then the presence of the amplified fragment would indicate the presence of the WNT5B variant mRNA molecule. In some embodiments, the nucleotide of the primer complementary to the uracil at a position corresponding to position 943 according to SEQ ID NO:35 can be at the 3′ end of the primer. In addition, if one of the primers' 3′-ends hybridizes to a cytosine at a position corresponding to position 405 according to SEQ ID NO:14 (rather than a uracil) in a particular WNT5B nucleic acid molecule, then the presence of the amplified fragment would indicate the presence of a WNT5B reference mRNA molecule. Conversely, if one of the primers' 3′-ends hybridizes to a uracil at a position corresponding to position 405 according to SEQ ID NO:36 (rather than a cytosine) in a particular WNT5B mRNA molecule, then the presence of the amplified fragment would indicate the presence of the WNT5B variant mRNA molecule. In some embodiments, the nucleotide of the primer complementary to the uracil at a position corresponding to position 405 according to SEQ ID NO:36 can be at the 3′ end of the primer.

[0181] If one of the primers' 3′-ends hybridizes to a cytosine at a position corresponding to position 65,099 according to SEQ ID NO:1 (rather than an adenine) in a particular WNT5B nucleic acid molecule, then the presence of the amplified fragment would indicate the presence of a WNT5B reference genomic nucleic acid molecule. Conversely, if one of the primers' 3′-ends hybridizes to an adenine at a position corresponding to position 65,099 according to SEQ ID NO:5 (rather than a cytosine) in a particular WNT5B nucleic acid molecule, then the presence of the amplified fragment would indicate the presence of the WNT5B variant genomic nucleic acid molecule. In some embodiments, the nucleotide of the primer complementary to the adenine at a position corresponding to position 65,099 according to SEQ ID NO:5 can be at the 3′ end of the primer. In addition, if one of the primers' 3′-ends hybridizes to a cytosine at a position corresponding to position 642 according to SEQ ID NO:7 (rather than an adenine) in a particular WNT5B nucleic acid molecule, then the presence of the amplified fragment would indicate the presence of a WNT5B reference mRNA molecule. Conversely, if one of the primers' 3′-ends hybridizes to an adenine at a position corresponding to position 642 according to SEQ ID NO:37 (rather than a cytosine) in a particular WNT5B mRNA molecule, then the presence of the amplified fragment would indicate the presence of the WNT5B variant mRNA molecule. In some embodiments, the nucleotide of the primer complementary to the adenine at a position corresponding to position 642 according to SEQ ID NO:37 can be at the 3′ end of the primer. In addition, if one of the primers' 3′-ends hybridizes to a cytosine at a position corresponding to position 545 according to SEQ ID NO:8 (rather than an adenine) in a particular WNT5B nucleic acid molecule, then the presence of the amplified fragment would indicate the presence of a WNT5B reference mRNA molecule. Conversely, if one of the primers' 3′-ends hybridizes to an adenine at a position corresponding to position 545 according to SEQ ID NO:38 (rather than a cytosine) in a particular WNT5B mRNA molecule, then the presence of the amplified fragment would indicate the presence of the WNT5B variant mRNA molecule. In some embodiments, the nucleotide of the primer complementary to the adenine at a position corresponding to position 545 according to SEQ ID NO:38 can be at the 3′ end of the primer. In addition, if one of the primers' 3′-ends hybridizes to a cytosine at a position corresponding to position 598 according to SEQ ID NO:9 (rather than an adenine) in a particular WNT5B nucleic acid molecule, then the presence of the amplified fragment would indicate the presence of a WNT5B reference mRNA molecule. Conversely, if one of the primers' 3′-ends hybridizes to an adenine at a position corresponding to position 598 according to SEQ ID NO:39 (rather than a cytosine) in a particular WNT5B mRNA molecule, then the presence of the amplified fragment would indicate the presence of the WNT5B variant mRNA molecule. In some embodiments, the nucleotide of the primer complementary to the adenine at a position corresponding to position 598 according to SEQ ID NO:39 can be at the 3′ end of the primer. In addition, if one of the primers' 3′-ends hybridizes to a cytosine at a position corresponding to position 545 according to SEQ ID NO:11 (rather than an adenine) in a particular WNT5B nucleic acid molecule, then the presence of the amplified fragment would indicate the presence of a WNT5B reference mRNA molecule. Conversely, if one of the primers' 3′-ends hybridizes to an adenine at a position corresponding to position 545 according to SEQ ID NO:40 (rather than a cytosine) in a particular WNT5B mRNA molecule, then the presence of the amplified fragment would indicate the presence of the WNT5B variant mRNA molecule. In some embodiments, the nucleotide of the primer complementary to the adenine at a position corresponding to position 545 according to SEQ ID NO:40 can be at the 3′ end of the primer. In addition, if one of the primers' 3′-ends hybridizes to a cytosine at a position corresponding to position 583 according to SEQ ID NO:12 (rather than an adenine) in a particular WNT5B nucleic acid molecule, then the presence of the amplified fragment would indicate the presence of a WNT5B reference mRNA molecule. Conversely, if one of the primers' 3′-ends hybridizes to an adenine at a position corresponding to position 583 according to SEQ ID NO:41 (rather than a cytosine) in a particular WNT5B mRNA molecule, then the presence of the amplified fragment would indicate the presence of the WNT5B variant mRNA molecule. In some embodiments, the nucleotide of the primer complementary to the adenine at a position corresponding to position 583 according to SEQ ID NO:41 can be at the 3′ end of the primer. In addition, if one of the primers' 3′-ends hybridizes to a cytosine at a position corresponding to position 943 according to SEQ ID NO:13 (rather than an adenine) in a particular WNT5B nucleic acid molecule, then the presence of the amplified fragment would indicate the presence of a WNT5B reference mRNA molecule. Conversely, if one of the primers' 3′-ends hybridizes to an adenine at a position corresponding to position 943 according to SEQ ID NO:42 (rather than a cytosine) in a particular WNT5B mRNA molecule, then the presence of the amplified fragment would indicate the presence of the WNT5B variant mRNA molecule. In some embodiments, the nucleotide of the primer complementary to the adenine at a position corresponding to position 943 according to SEQ ID NO:42 can be at the 3′ end of the primer. In addition, if one of the primers' 3′-ends hybridizes to a cytosine at a position corresponding to position 405 according to SEQ ID NO:14 (rather than an adenine) in a particular WNT5B nucleic acid molecule, then the presence of the amplified fragment would indicate the presence of a WNT5B reference mRNA molecule. Conversely, if one of the primers' 3′-ends hybridizes to an adenine at a position corresponding to position 405 according to SEQ ID NO:43 (rather than a cytosine) in a particular WNT5B mRNA molecule, then the presence of the amplified fragment would indicate the presence of the WNT5B variant mRNA molecule. In some embodiments, the nucleotide of the primer complementary to the adenine at a position corresponding to position 405 according to SEQ ID NO:43 can be at the 3′ end of the primer.

[0182] If one of the primers' 3′-ends hybridizes to a TC dinucleotide at a position corresponding to positions 71,313-71,314 according to SEQ ID NO:1 (rather than an AA dinucleotide) in a particular WNT5B nucleic acid molecule, then the presence of the amplified fragment would indicate the presence of a WNT5B reference genomic nucleic acid molecule. Conversely, if one of the primers' 3′-ends hybridizes to an AA dinucleotide at positions corresponding to positions 71,313-71,314 according to SEQ ID NO:6 (rather than a TC dinucleotide) in a particular WNT5B nucleic acid molecule, then the presence of the amplified fragment would indicate the presence of the WNT5B variant genomic nucleic acid molecule. In some embodiments, the nucleotide of the primer complementary to the AA dinucleotide at positions corresponding to positions 71,313-71,314 according to SEQ ID NO:6 can be at the 3′ end of the primer. In addition, if one of the primers' 3′-ends hybridizes to a UC dinucleotide at a position corresponding to positions 1,039-1,040 according to SEQ ID NO:7 (rather than an AA dinucleotide) in a particular WNT5B nucleic acid molecule, then the presence of the amplified fragment would indicate the presence of a WNT5B reference mRNA molecule. Conversely, if one of the primers' 3′-ends hybridizes to an AA dinucleotide at positions corresponding to positions 1,039-1,040 according to SEQ ID NO:44 (rather than a UC dinucleotide) in a particular WNT5B mRNA molecule, then the presence of the amplified fragment would indicate the presence of the WNT5B variant mRNA molecule. In some embodiments, the nucleotide of the primer complementary to the AA dinucleotide at positions corresponding to positions 1,039-1,040 according to SEQ ID NO:44 can be at the 3′ end of the primer. In addition, if one of the primers' 3′-ends hybridizes to a UC dinucleotide at a position corresponding to positions 942-943 according to SEQ ID NO:8 (rather than an AA dinucleotide) in a particular WNT5B nucleic acid molecule, then the presence of the amplified fragment would indicate the presence of a WNT5B reference mRNA molecule. Conversely, if one of the primers' 3′-ends hybridizes to an AA dinucleotide at positions corresponding to positions 942-943 according to SEQ ID NO:45 (rather than a UC dinucleotide) in a particular WNT5B mRNA molecule, then the presence of the amplified fragment would indicate the presence of the WNT5B variant mRNA molecule. In some embodiments, the nucleotide of the primer complementary to the AA dinucleotide at positions corresponding to positions 942-943 according to SEQ ID NO:45 can be at the 3′ end of the primer. In addition, if one of the primers' 3′-ends hybridizes to a UC dinucleotide at a position corresponding to positions 995-996 according to SEQ ID NO:9 (rather than an AA dinucleotide) in a particular WNT5B nucleic acid molecule, then the presence of the amplified fragment would indicate the presence of a WNT5B reference mRNA molecule. Conversely, if one of the primers' 3′-ends hybridizes to an AA dinucleotide at positions corresponding to positions 995-996 according to SEQ ID NO:46 (rather than a UC dinucleotide) in a particular WNT5B mRNA molecule, then the presence of the amplified fragment would indicate the presence of the WNT5B variant mRNA molecule. In some embodiments, the nucleotide of the primer complementary to the AA dinucleotide at positions corresponding to positions 995-996 according to SEQ ID NO:46 can be at the 3′ end of the primer. In addition, if one of the primers' 3′-ends hybridizes to a UC dinucleotide at a position corresponding to positions 942-943 according to SEQ ID NO:11 (rather than an AA dinucleotide) in a particular WNT5B nucleic acid molecule, then the presence of the amplified fragment would indicate the presence of a WNT5B reference mRNA molecule. Conversely, if one of the primers' 3′-ends hybridizes to an AA dinucleotide at positions corresponding to positions 942-943 according to SEQ ID NO:47 (rather than a UC dinucleotide) in a particular WNT5B mRNA molecule, then the presence of the amplified fragment would indicate the presence of the WNT5B variant mRNA molecule. In some embodiments, the nucleotide of the primer complementary to the AA dinucleotide at positions corresponding to positions 942-943 according to SEQ ID NO:47 can be at the 3′ end of the primer. In addition, if one of the primers' 3′-ends hybridizes to a UC dinucleotide at a position corresponding to positions 980-981 according to SEQ ID NO:12 (rather than an AA dinucleotide) in a particular WNT5B nucleic acid molecule, then the presence of the amplified fragment would indicate the presence of a WNT5B reference mRNA molecule. Conversely, if one of the primers' 3′-ends hybridizes to an AA dinucleotide at positions corresponding to positions 980-981 according to SEQ ID NO:48 (rather than a UC dinucleotide) in a particular WNT5B mRNA molecule, then the presence of the amplified fragment would indicate the presence of the WNT5B variant mRNA molecule. In some embodiments, the nucleotide of the primer complementary to the AA dinucleotide at positions corresponding to positions 980-981 according to SEQ ID NO:48 can be at the 3′ end of the primer. In addition, if one of the primers' 3′-ends hybridizes to a UC dinucleotide at a position corresponding to positions 802-803 according to SEQ ID NO:14 (rather than an AA dinucleotide) in a particular WNT5B nucleic acid molecule, then the presence of the amplified fragment would indicate the presence of a WNT5B reference mRNA molecule. Conversely, if one of the primers' 3′-ends hybridizes to an AA dinucleotide at positions corresponding to positions 802-803 according to SEQ ID NO:49 (rather than a UC dinucleotide) in a particular WNT5B mRNA molecule, then the presence of the amplified fragment would indicate the presence of the WNT5B variant mRNA molecule. In some embodiments, the nucleotide of the primer complementary to the AA dinucleotide at positions corresponding to positions 802-803 according to SEQ ID NO:49 can be at the 3′ end of the primer. In addition, if one of the primers' 3′-ends hybridizes to a TC dinucleotide at a position corresponding to positions 1,039-1,040 according to SEQ ID NO:50 (rather than an AA dinucleotide) in a particular WNT5B nucleic acid molecule, then the presence of the amplified fragment would indicate the presence of a WNT5B reference cDNA molecule. Conversely, if one of the primers' 3′-ends hybridizes to an AA dinucleotide at positions corresponding to positions 1,039-1,040 according to SEQ ID NO:87 (rather than a TC dinucleotide) in a particular WNT5B cDNA molecule, then the presence of the amplified fragment would indicate the presence of the WNT5B variant cDNA molecule. In some embodiments, the nucleotide of the primer complementary to the AA dinucleotide at positions corresponding to positions 1,039-1,040 according to SEQ ID NO:87 can be at the 3′ end of the primer. In addition, if one of the primers' 3′-ends hybridizes to a TC dinucleotide at a position corresponding to positions 942-943 according to SEQ ID NO:51 (rather than an AA dinucleotide) in a particular WNT5B nucleic acid molecule, then the presence of the amplified fragment would indicate the presence of a WNT5B reference cDNA molecule. Conversely, if one of the primers' 3′-ends hybridizes to an AA dinucleotide at positions corresponding to positions 942-943 according to SEQ ID NO:88 (rather than a TC dinucleotide) in a particular WNT5B cDNA molecule, then the presence of the amplified fragment would indicate the presence of the WNT5B variant cDNA molecule. In some embodiments, the nucleotide of the primer complementary to the AA dinucleotide at positions corresponding to positions 942-943 according to SEQ ID NO:88 can be at the 3′ end of the primer. In addition, if one of the primers' 3′-ends hybridizes to a TC dinucleotide at a position corresponding to positions 995-996 according to SEQ ID NO:52 (rather than an AA dinucleotide) in a particular WNT5B nucleic acid molecule, then the presence of the amplified fragment would indicate the presence of a WNT5B reference cDNA molecule. Conversely, if one of the primers' 3′-ends hybridizes to an AA dinucleotide at positions corresponding to positions 995-996 according to SEQ ID NO:89 (rather than a TC dinucleotide) in a particular WNT5B cDNA molecule, then the presence of the amplified fragment would indicate the presence of the WNT5B variant cDNA molecule. In some embodiments, the nucleotide of the primer complementary to the AA dinucleotide at positions corresponding to positions 995-996 according to SEQ ID NO:89 can be at the 3′ end of the primer. In addition, if one of the primers' 3′-ends hybridizes to a TC dinucleotide at a position corresponding to positions 942-943 according to SEQ ID NO:54 (rather than an AA dinucleotide) in a particular WNT5B nucleic acid molecule, then the presence of the amplified fragment would indicate the presence of a WNT5B reference cDNA molecule. Conversely, if one of the primers' 3′-ends hybridizes to an AA dinucleotide at positions corresponding to positions 942-943 according to SEQ ID NO:90 (rather than a TC dinucleotide) in a particular WNT5B cDNA molecule, then the presence of the amplified fragment would indicate the presence of the WNT5B variant cDNA molecule. In some embodiments, the nucleotide of the primer complementary to the AA dinucleotide at positions corresponding to positions 942-943 according to SEQ ID NO:90 can be at the 3′ end of the primer. In addition, if one of the primers' 3′-ends hybridizes to a TC dinucleotide at a position corresponding to positions 980-981 according to SEQ ID NO:55 (rather than an AA dinucleotide) in a particular WNT5B nucleic acid molecule, then the presence of the amplified fragment would indicate the presence of a WNT5B reference cDNA molecule. Conversely, if one of the primers' 3′-ends hybridizes to an AA dinucleotide at positions corresponding to positions 980-981 according to SEQ ID NO:91 (rather than a TC dinucleotide) in a particular WNT5B cDNA molecule, then the presence of the amplified fragment would indicate the presence of the WNT5B variant cDNA molecule. In some embodiments, the nucleotide of the primer complementary to the AA dinucleotide at positions corresponding to positions 980-981 according to SEQ ID NO:91 can be at the 3′ end of the primer. In addition, if one of the primers' 3′-ends hybridizes to a TC dinucleotide at a position corresponding to positions 802-803 according to SEQ ID NO:57 (rather than a deletion of a TC dinucleotide) in a particular WNT5B nucleic acid molecule, then the presence of the amplified fragment would indicate the presence of a WNT5B reference cDNA molecule. Conversely, if one of the primers' 3′-ends hybridizes to a deletion of a TC dinucleotide at positions corresponding to positions 802-803 according to SEQ ID NO:92 (rather than a TC dinucleotide) in a particular WNT5B cDNA molecule, then the presence of the amplified fragment would indicate the presence of the WNT5B variant cDNA molecule. In some embodiments, the nucleotide of the primer complementary to the AA dinucleotide at positions corresponding to positions 802-803 according to SEQ ID NO:92 can be at the 3′ end of the primer.

[0183] In the context of the present disclosure “specifically hybridizes” means that the probe or primer (such as, for example, the alteration-specific probe or alteration-specific primer) does not hybridize to a nucleic acid sequence encoding a WNT5B reference genomic nucleic acid molecule, a WNT5B reference mRNA molecule, and/or a WNT5B reference cDNA molecule.

[0184] In any of the embodiments described throughout the present disclosure, the probes (such as, for example, an alteration-specific probe) can comprise a label. In some embodiments, the label is a fluorescent label, a radiolabel, or biotin.

[0185] The present disclosure also provides supports comprising a substrate to which any one or more of the probes disclosed herein is attached. Solid supports are solid-state substrates or supports with which molecules, such as any of the probes disclosed herein, can be associated. A form of solid support is an array. Another form of solid support is an array detector. An array detector is a solid support to which multiple different probes have been coupled in an array, grid, or other organized pattern. A form for a solid-state substrate is a microtiter dish, such as a standard 96-well type. In some embodiments, a multiwell glass slide can be employed that normally contains one array per well. In some embodiments, the support is a microarray.

[0186] The present disclosure also provides molecular complexes comprising or consisting of any of the WNT5B nucleic acid molecules (genomic nucleic acid molecules, mRNA molecules, or cDNA molecules), or complement thereof, described herein and any of the alteration-specific primers or alteration-specific probes described herein. In some embodiments, the WNT5B nucleic acid molecules (genomic nucleic acid molecules, mRNA molecules, or cDNA molecules), or complement thereof, in the molecular complexes are single-stranded. In some embodiments, the WNT5B nucleic acid molecule is any of the genomic nucleic acid molecules described herein. In some embodiments, the WNT5B nucleic acid molecule is any of the mRNA molecules described herein. In some embodiments, the WNT5B nucleic acid molecule is any of the cDNA molecules described herein. In some embodiments, the molecular complex comprises or consists of any of the WNT5B nucleic acid molecules (genomic nucleic acid molecules, mRNA molecules, or cDNA molecules), or complement thereof, described herein and any of the alteration-specific primers described herein. In some embodiments, the molecular complex comprises or consists of any of the WNT5B nucleic acid molecules (genomic nucleic acid molecules, mRNA molecules, or cDNA molecules), or complement thereof, described herein and any of the alteration-specific probes described herein.

[0187] In some embodiments, the molecular complex comprises or consists of an alteration-specific primer or an alteration-specific probe hybridized to a WNT5B genomic nucleic acid molecule encoding a WNT5B predicted loss-of-function polypeptide, wherein the alteration-specific primer or the alteration-specific probe is hybridized to the WNT5B genomic nucleic acid molecule at a position corresponding to: position 56,698 according to SEQ ID NO:2, or the complement thereof; position 58,170 according to SEQ ID NO:3, or the complement thereof; position 65,099 according to SEQ ID NO:4, or the complement thereof; position 65,099 according to SEQ ID NO:5, or the complement thereof; or positions 71,313-71,314 according to SEQ ID NO:6, or the complement thereof.

[0188] In some embodiments, the molecular complex comprises or consists of an alteration-specific primer or an alteration-specific probe that is hybridized to: a TGA codon at positions corresponding to positions 58,168-58,170 according to SEQ ID NO:3, a TGC codon at positions corresponding to positions 65,099-65,101 according to SEQ ID NO:4, or an AGC codon at positions corresponding to positions 65,099-65,101 according to SEQ ID NO:5.

[0189] In some embodiments, the molecular complex comprises or consists of a genomic nucleic acid molecule that comprises SEQ ID NO:2, SEQ ID NO:3, SEQ ID NO:4, SEQ ID NO:5, or SEQ ID NO:6.

[0190] In some embodiments, the molecular complex comprises or consists of an alteration-specific primer or an alteration-specific probe hybridized to a WNT5B mRNA molecule encoding a WNT5B predicted loss-of-function polypeptide, wherein the alteration-specific primer or the alteration-specific probe is hybridized to the WNT5B mRNA molecule at a position corresponding to: position 242 according to SEQ ID NO:15, or the complement thereof; position 145 according to SEQ ID NO:16, or the complement thereof; position 198 according to SEQ ID NO:17, or the complement thereof; position 40 according to SEQ ID NO:18, or the complement thereof; position 145 according to SEQ ID NO:19, or the complement thereof; position 183 according to SEQ ID NO:20, or the complement thereof; position 543 according to SEQ ID NO:21, or the complement thereof; position 491 according to SEQ ID NO:22, or the complement thereof; position 394 according to SEQ ID NO:23, or the complement thereof; position 447 according to SEQ ID NO:24, or the complement thereof; position 289 according to SEQ ID NO:25, or the complement thereof; position 394 according to SEQ ID NO:26, or the complement thereof; position 432 according to SEQ ID NO:27, or the complement thereof; position 792 according to SEQ ID NO:28, or the complement thereof; position 254 according to SEQ ID NO:29, or the complement thereof; position 642 according to SEQ ID NO:30, or the complement thereof; position 545 according to SEQ ID NO:31, or the complement thereof; position 598 according to SEQ ID NO:32, or the complement thereof; position 545 according to SEQ ID NO:33, or the complement thereof; position 583 according to SEQ ID NO:34, or the complement thereof; position 943 according to SEQ ID NO:35, or the complement thereof; position 405 according to SEQ ID NO:36, or the complement thereof; position 642 according to SEQ ID NO:37, or the complement thereof; position 545 according to SEQ ID NO:38, or the complement thereof; position 598 according to SEQ ID NO:39, or the complement thereof; position 545 according to SEQ ID NO:40, or the complement thereof; position 583 according to SEQ ID NO:41, or the complement thereof; position 943 according to SEQ ID NO:42, or the complement thereof; position 405 according to SEQ ID NO:43, or the complement thereof; positions 1,039-1,040 according to SEQ ID NO:44, or the complement thereof; positions 942-943 according to SEQ ID NO:45, or the complement thereof; positions 995-996 according to SEQ ID NO:46, or the complement thereof; positions 942-943 according to SEQ ID NO:47, or the complement thereof; positions 980-981 according to SEQ ID NO:48, or the complement thereof; positions 802-803 according to SEQ ID NO:49, or the complement thereof.

[0191] In some embodiments, the molecular complex comprises or consists of an alteration-specific primer or an alteration-specific probe that is hybridized to: a UGA codon at positions corresponding to positions 489-491 according to SEQ ID NO:22, a UGA codon at positions corresponding to positions 392-394 according to SEQ ID NO:23, a UGA codon at positions corresponding to positions 445-447 according to SEQ ID NO:24, a UGA codon at positions corresponding to positions 287-289 according to SEQ ID NO:25, a UGA codon at positions corresponding to positions 392-394 according to SEQ ID NO:26, a UGA codon at positions corresponding to positions 430-432 according to SEQ ID NO:27, a UGA codon at positions corresponding to positions 790-792 according to SEQ ID NO:28, a UGA codon at positions corresponding to positions 252-254 according to SEQ ID NO:29, a UGC codon at positions corresponding to positions 642-644 according to SEQ ID NO:30, a UGC codon at positions corresponding to positions 545-547 according to SEQ ID NO:31, a UGC codon at positions corresponding to positions 598-600 according to SEQ ID NO:32, a UGC codon at positions corresponding to positions 545-547 according to SEQ ID NO:33, a UGC codon at positions corresponding to positions 583-585 according to SEQ ID NO:34, a UGC codon at positions corresponding to positions 943-945 according to SEQ ID NO:35, a UGC codon at positions corresponding to positions 405-407 according to SEQ ID NO:36, an AGC codon at positions corresponding to positions 642-644 according to SEQ ID NO:37, an AGC codon at positions corresponding to positions 545-547 according to SEQ ID NO:38, an AGC codon at positions corresponding to positions 598-600 according to SEQ ID NO:39, an AGC codon at positions corresponding to positions 545-547 according to SEQ ID NO:40, an AGC codon at positions corresponding to positions 583-585 according to SEQ ID NO:41, an AGC codon at positions corresponding to positions 943-945 according to SEQ ID NO:42, an AGC codon at positions corresponding to positions 405-407 according to SEQ ID NO:43.

[0192] In some embodiments, the molecular complex comprises or consists of an mRNA molecule that comprises SEQ ID NO:15, SEQ ID NO:16, SEQ ID NO:17, SEQ ID NO:18, SEQ ID NO:19, SEQ ID NO:20, SEQ ID NO:21, SEQ ID NO:22, SEQ ID NO:23, SEQ ID NO:24, SEQ ID NO:25, SEQ ID NO:26, SEQ ID NO:27, SEQ ID NO:28, SEQ ID NO:29, SEQ ID NO:30, SEQ ID NO:31, SEQ ID NO:32, SEQ ID NO:33, SEQ ID NO:34, SEQ ID NO:35, SEQ ID NO:36, SEQ ID NO:37, SEQ ID NO:38, SEQ ID NO:39, SEQ ID NO:40, SEQ ID NO:41, SEQ ID NO:42, SEQ ID NO:43, SEQ ID NO:44, SEQ ID NO:45, SEQ ID NO:46, SEQ ID NO:47, SEQ ID NO:48, SEQ ID NO:49.

[0193] In some embodiments, the molecular complex comprises or consists of an alteration-specific primer or an alteration-specific probe hybridized to a WNT5B cDNA molecule encoding a WNT5B predicted loss-of-function polypeptide, wherein the alteration-specific primer or the alteration-specific probe is hybridized to the WNT5B cDNA molecule at a position corresponding to: position 242 according to SEQ ID NO:58, or the complement thereof; position 145 according to SEQ ID NO:59, or the complement thereof; position 198 according to SEQ ID NO:60, or the complement thereof; position 40 according to SEQ ID NO:61, or the complement thereof; position 145 according to SEQ ID NO:62, or the complement thereof; position 183 according to SEQ ID NO:63, or the complement thereof; position 543 according to SEQ ID NO:64, or the complement thereof; position 491 according to SEQ ID NO:65, or the complement thereof; position 394 according to SEQ ID NO:66, or the complement thereof; position 447 according to SEQ ID NO:67, or the complement thereof; position 289 according to SEQ ID NO:68, or the complement thereof; position 394 according to SEQ ID NO:69, or the complement thereof; position 432 according to SEQ ID NO:70, or the complement thereof; position 792 according to SEQ ID NO:71, or the complement thereof; position 254 according to SEQ ID NO:72, or the complement thereof; position 642 according to SEQ ID NO:73, or the complement thereof; position 545 according to SEQ ID NO:74, or the complement thereof; position 598 according to SEQ ID NO:75, or the complement thereof; position 545 according to SEQ ID NO:76, or the complement thereof; position 583 according to SEQ ID NO:77, or the complement thereof; position 943 according to SEQ ID NO:78, or the complement thereof; position 405 according to SEQ ID NO:79, or the complement thereof; position 642 according to SEQ ID NO:80, or the complement thereof; position 545 according to SEQ ID NO:81, or the complement thereof; position 598 according to SEQ ID NO:82, or the complement thereof; position 545 according to SEQ ID NO:83, or the complement thereof; position 583 according to SEQ ID NO:84, or the complement thereof; position 943 according to SEQ ID NO:85, or the complement thereof; position 405 according to SEQ ID NO:86, or the complement thereof; positions 1,039-1,040 according to SEQ ID NO:87, or the complement thereof; positions 942-943 according to SEQ ID NO:88, or the complement thereof; positions 995-996 according to SEQ ID NO:89, or the complement thereof; positions 942-943 according to SEQ ID NO:90, or the complement thereof; positions 980-981 according to SEQ ID NO:91, or the complement thereof; positions 802-803 according to SEQ ID NO:92, or the complement thereof.

[0194] In some embodiments, the molecular complex comprises or consists of an alteration-specific primer or an alteration-specific probe that is hybridized to: a TGA codon at positions corresponding to positions 489-491 according to SEQ ID NO:65, a TGA codon at positions corresponding to positions 392-394 according to SEQ ID NO:66, a TGA codon at positions corresponding to positions 445-447 according to SEQ ID NO:67, a TGA codon at positions corresponding to positions 287-289 according to SEQ ID NO:68, a TGA codon at positions corresponding to positions 392-394 according to SEQ ID NO:69, a TGA codon at positions corresponding to positions 430-432 according to SEQ ID NO:70, a TGA codon at positions corresponding to positions 790-792 according to SEQ ID NO:71, a TGA codon at positions corresponding to positions 252-254 according to SEQ ID NO:72, a TGC codon at positions corresponding to positions 642-644 according to SEQ ID NO:73, a TGC codon at positions corresponding to positions 545-547 according to SEQ ID NO:74, a TGC codon at positions corresponding to positions 598-600 according to SEQ ID NO:75, a TGC codon at positions corresponding to positions 545-547 according to SEQ ID NO:76, a TGC codon at positions corresponding to positions 583-585 according to SEQ ID NO:77, a TGC codon at positions corresponding to positions 943-945 according to SEQ ID NO:78, a TGC codon at positions corresponding to positions 405-407 according to SEQ ID NO:79, an AGC codon at positions corresponding to positions 642-644 according to SEQ ID NO:80, an AGC codon at positions corresponding to positions 545-547 according to SEQ ID NO:81, an AGC codon at positions corresponding to positions 598-600 according to SEQ ID NO:82, an AGC codon at positions corresponding to positions 545-547 according to SEQ ID NO:83, an AGC codon at positions corresponding to positions 583-585 according to SEQ ID NO:84, an AGC codon at positions corresponding to positions 943-945 according to SEQ ID NO:85, an AGC codon at positions corresponding to positions 405-407 according to SEQ ID NO:86.

[0195] In some embodiments, the molecular complex comprises or consists of an cDNA molecule that comprises SEQ ID NO:58, SEQ ID NO:59, SEQ ID NO:60, SEQ ID NO:61, SEQ ID NO:62, SEQ ID NO:63, SEQ ID NO:64, SEQ ID NO:65, SEQ ID NO:66, SEQ ID NO:67, SEQ ID NO:68, SEQ ID NO:69, SEQ ID NO:70, SEQ ID NO:71, SEQ ID NO:72, SEQ ID NO:73, SEQ ID NO:74, SEQ ID NO:75, SEQ ID NO:76, SEQ ID NO:77, SEQ ID NO:78, SEQ ID NO:79, SEQ ID NO:80, SEQ ID NO:81, SEQ ID NO:82, SEQ ID NO:83, SEQ ID NO:84, SEQ ID NO:85, SEQ ID NO:86, SEQ ID NO:87, SEQ ID NO:88, SEQ ID NO:89, SEQ ID NO:90, SEQ ID NO:91, SEQ ID NO:92.

[0196] In some embodiments, the molecular complex comprises an alteration-specific probe or an alteration-specific primer comprising a label. In some embodiments, the label is a fluorescent label, a radiolabel, or biotin. In some embodiments, the molecular complex further comprises a non-human polymerase.

[0197] The present disclosure also provides isolated WNT5B variant nucleic acid molecules encoding a WNT5B predicted loss-of-function polypeptide, or the complement thereof. In some embodiments, the WNT5B predicted loss-of-function polypeptide comprises a truncation at a position corresponding to position 83 according to SEQ ID NO:96, or the complement thereof. In some embodiments, the isolated nucleic acid molecule encodes a WNT5B predicted loss-of-function polypeptide having an amino acid sequence that has at least about 90%, at least about 91%, at least about 92%, at least about 93%, at least about 94%, at least about 95%, at least about 96%, at least about 97%, at least about 98%, or at least about 99% sequence identity to: SEQ ID NO:96, and comprises a truncation at a position corresponding to position 83 according to SEQ ID NO:96. In some embodiments, the isolated nucleic acid molecule encodes a WNT5B predicted loss-of-function polypeptide having an amino acid sequence that has at least about 90% sequence identity to: SEQ ID NO:96, and comprises a truncation at a position corresponding to position 83 according to SEQ ID NO:96. In some embodiments, the isolated nucleic acid molecule encodes a WNT5B predicted loss-of-function polypeptide having an amino acid sequence that has at least about 92% sequence identity to: SEQ ID NO:96, and comprises a truncation at a position corresponding to position 83 according to SEQ ID NO:96. In some embodiments, the isolated nucleic acid molecule encodes a WNT5B predicted loss-of-function polypeptide having an amino acid sequence that has at least about 94% sequence identity to: SEQ ID NO:96, and comprises a truncation at a position corresponding to position 83 according to SEQ ID NO:96. In some embodiments, the isolated nucleic acid molecule encodes a WNT5B predicted loss-of-function polypeptide having an amino acid sequence that has at least about 96% sequence identity to: SEQ ID NO:96, and comprises a truncation at a position corresponding to position 83 according to SEQ ID NO:96. In some embodiments, the isolated nucleic acid molecule encodes a WNT5B predicted loss-of-function polypeptide having an amino acid sequence that has at least about 98% sequence identity to: SEQ ID NO:96, and comprises a truncation at a position corresponding to position 83 according to SEQ ID NO:96. In some embodiments, the nucleic acid molecule encodes a WNT5B variant polypeptide comprising SEQ ID NO:96. In some embodiments, the nucleic acid molecule encodes a WNT5B predicted loss-of-function polypeptide consisting of SEQ ID NO:96.

[0198] In some embodiments, the WNT5B predicted loss-of-function polypeptide comprises a truncation at a position corresponding to position 83 according to SEQ ID NO:97, or the complement thereof. In some embodiments, the isolated nucleic acid molecule encodes a WNT5B predicted loss-of-function polypeptide having an amino acid sequence that has at least about 90%, at least about 91%, at least about 92%, at least about 93%, at least about 94%, at least about 95%, at least about 96%, at least about 97%, at least about 98%, or at least about 99% sequence identity to: SEQ ID NO:97, and comprises a truncation at a position corresponding to position 83 according to SEQ ID NO:97. In some embodiments, the isolated nucleic acid molecule encodes a WNT5B predicted loss-of-function polypeptide having an amino acid sequence that has at least about 90% sequence identity to: SEQ ID NO:97, and comprises a truncation at a position corresponding to position 83 according to SEQ ID NO:97. In some embodiments, the isolated nucleic acid molecule encodes a WNT5B predicted loss-of-function polypeptide having an amino acid sequence that has at least about 92% sequence identity to: SEQ ID NO:97, and comprises a truncation at a position corresponding to position 83 according to SEQ ID NO:97. In some embodiments, the isolated nucleic acid molecule encodes a WNT5B predicted loss-of-function polypeptide having an amino acid sequence that has at least about 94% sequence identity to: SEQ ID NO:97, and comprises a truncation at a position corresponding to position 83 according to SEQ ID NO:97. In some embodiments, the isolated nucleic acid molecule encodes a WNT5B predicted loss-of-function polypeptide having an amino acid sequence that has at least about 96% sequence identity to: SEQ ID NO:97, and comprises a truncation at a position corresponding to position 83 according to SEQ ID NO:97. In some embodiments, the isolated nucleic acid molecule encodes a WNT5B predicted loss-of-function polypeptide having an amino acid sequence that has at least about 98% sequence identity to: SEQ ID NO:97, and comprises a truncation at a position corresponding to position 83 according to SEQ ID NO:97. In some embodiments, the nucleic acid molecule encodes a WNT5B predicted loss-of-function polypeptide comprising SEQ ID NO:97. In some embodiments, the nucleic acid molecule encodes a WNT5B predicted loss-of-function polypeptide consisting of SEQ ID NO:97.

[0199] In some embodiments, the WNT5B predicted loss-of-function polypeptide comprises a truncation at a position corresponding to position 113 according to SEQ ID NO:98, or the complement thereof. In some embodiments, the isolated nucleic acid molecule encodes a WNT5B predicted loss-of-function polypeptide having an amino acid sequence that has at least about 90%, at least about 91%, at least about 92%, at least about 93%, at least about 94%, at least about 95%, at least about 96%, at least about 97%, at least about 98%, or at least about 99% sequence identity to: SEQ ID NO:98, and comprises a truncation at a position corresponding to position 113 according to SEQ ID NO:98. In some embodiments, the isolated nucleic acid molecule encodes a WNT5B predicted loss-of-function polypeptide having an amino acid sequence that has at least about 90% sequence identity to: SEQ ID NO:98, and comprises a truncation at a position corresponding to position 113 according to SEQ ID NO:98. In some embodiments, the isolated nucleic acid molecule encodes a WNT5B predicted loss-of-function polypeptide having an amino acid sequence that has at least about 92% sequence identity to: SEQ ID NO:98, and comprises a truncation at a position corresponding to position 113 according to SEQ ID NO:98. In some embodiments, the isolated nucleic acid molecule encodes a WNT5B predicted loss-of-function polypeptide having an amino acid sequence that has at least about 94% sequence identity to: SEQ ID NO:98, and comprises a truncation at a position corresponding to position 113 according to SEQ ID NO:98. In some embodiments, the isolated nucleic acid molecule encodes a WNT5B predicted loss-of-function polypeptide having an amino acid sequence that has at least about 96% sequence identity to: SEQ ID NO:98, and comprises a truncation at a position corresponding to position 113 according to SEQ ID NO:98. In some embodiments, the isolated nucleic acid molecule encodes a WNT5B predicted loss-of-function polypeptide having an amino acid sequence that has at least about 98% sequence identity to: SEQ ID NO:98, and comprises a truncation at a position corresponding to position 113 according to SEQ ID NO:98. In some embodiments, the nucleic acid molecule encodes a WNT5B predicted loss-of-function polypeptide comprising SEQ ID NO:98. In some embodiments, the nucleic acid molecule encodes a WNT5B predicted loss-of-function polypeptide consisting of SEQ ID NO:98.

[0200] In some embodiments, the WNT5B predicted loss-of-function polypeptide comprises a frameshift mutation at a position corresponding to position 266 according to SEQ ID NO:103, or the complement thereof. In some embodiments, the isolated nucleic acid molecule encodes a WNT5B predicted loss-of-function polypeptide having an amino acid sequence that has at least about 90%, at least about 91%, at least about 92%, at least about 93%, at least about 94%, at least about 95%, at least about 96%, at least about 97%, at least about 98%, or at least about 99% sequence identity to: SEQ ID NO:103, and comprises a frameshift mutation at a position corresponding to position 266 according to SEQ ID NO:103. In some embodiments, the isolated nucleic acid molecule encodes a WNT5B predicted loss-of-function polypeptide having an amino acid sequence that has at least about 90% sequence identity to: SEQ ID NO:103, and comprises a frameshift mutation at a position corresponding to position 266 according to SEQ ID NO:103. In some embodiments, the isolated nucleic acid molecule encodes a WNT5B predicted loss-of-function polypeptide having an amino acid sequence that has at least about 92% sequence identity to: SEQ ID NO:103, and comprises a frameshift mutation at a position corresponding to position 266 according to SEQ ID NO:103. In some embodiments, the isolated nucleic acid molecule encodes a WNT5B predicted loss-of-function polypeptide having an amino acid sequence that has at least about 94% sequence identity to: SEQ ID NO:103, and comprises a frameshift mutation at a position corresponding to position 266 according to SEQ ID NO:103. In some embodiments, the isolated nucleic acid molecule encodes a WNT5B predicted loss-of-function polypeptide having an amino acid sequence that has at least about 96% sequence identity to: SEQ ID NO:103, and comprises a frameshift mutation at a position corresponding to position 266 according to SEQ ID NO:103. In some embodiments, the isolated nucleic acid molecule encodes a WNT5B predicted loss-of-function polypeptide having an amino acid sequence that has at least about 98% sequence identity to: SEQ ID NO:103, and comprises a frameshift mutation at a position corresponding to position 266 according to SEQ ID NO:103. In some embodiments, the nucleic acid molecule encodes a WNT5B predicted loss-of-function polypeptide comprising SEQ ID NO:103. In some embodiments, the nucleic acid molecule encodes a WNT5B predicted loss-of-function polypeptide consisting of SEQ ID NO:103.

[0201] The nucleotide sequence of a WNT5B reference genomic nucleic acid molecule is set forth in SEQ ID NO:1 (GRCh38/hg38 chr12:1574657-1647867 ENSG00000111186.13 71,711 bp; alternately, chr12:1529891-1647212 with a length of 117,322 bp). Referring to SEQ ID NO:1, position 56,698 is a cytosine. Referring to SEQ ID NO:1, position 58,170 is a thymine. Referring to SEQ ID NO:1, position 65,099 is a cytosine. Referring to SEQ ID NO:1, position 65,099 is a cytosine. Referring to SEQ ID NO:1, positions 71,313-71,314 is a TC dinucleotide.

[0202] A WNT5B variant genomic nucleic acid molecule exists, wherein the cytosine at position 56,698 is replaced with a thymine. The nucleotide sequence of this WNT5B variant genomic nucleic acid molecule is set forth in SEQ ID NO:2.

[0203] Another WNT5B variant genomic nucleic acid molecule exists, wherein the thymine at position 58,170 is replaced with an adenine. The nucleotide sequence of this WNT5B variant genomic nucleic acid molecule is set forth in SEQ ID NO:3.

[0204] Another WNT5B variant genomic nucleic acid molecule exists, wherein the cytosine at position 65,099 is replaced with a thymine. The nucleotide sequence of this WNT5B variant genomic nucleic acid molecule is set forth in SEQ ID NO:4.

[0205] Another WNT5B variant genomic nucleic acid molecule exists, wherein the cytosine at position 65,099 is replaced with an adenine. The nucleotide sequence of this WNT5B variant genomic nucleic acid molecule is set forth in SEQ ID NO:5.

[0206] Another WNT5B variant genomic nucleic acid molecule exists, wherein the TC dinucleotide at positions 71,313-71,314 is deleted. The nucleotide sequence of this WNT5B variant genomic nucleic acid molecule is set forth in SEQ ID NO:6.

[0207] The present disclosure also provides isolated genomic nucleic acid molecules comprising or consisting of a nucleotide sequence encoding a WNT5B predicted loss-of-function polypeptide, or the complement thereof, wherein the nucleotide sequence comprises: an adenine at a position corresponding to position 58,170 according to SEQ ID NO:3, or the complement thereof; or a deletion of a TC dinucleotide at positions corresponding to positions 71,313-71,314 according to SEQ ID NO:6, or the complement thereof.

[0208] In some embodiments, the nucleotide sequence of the genomic nucleic acid molecule comprises a TGA codon at positions corresponding to positions 58,168-58,170 according to SEQ ID NO:3.

[0209] In some embodiments, the nucleotide sequence has at least 90% sequence identity to: SEQ ID NO:3, and comprises an adenine at a position corresponding to position 58,170 according to SEQ ID NO:3; SEQ ID NO:6, and comprises a deletion of a TC dinucleotide at positions corresponding to positions 71,313-71,314 according to SEQ ID NO:6.

[0210] In some embodiments, the nucleotide sequence of the genomic nucleic acid molecule has at least 90% sequence identity to SEQ ID NO:3, and comprises a TGA codon at positions corresponding to positions 58,168-58,170 according to SEQ ID NO:3.

[0211] In some embodiments, the nucleotide sequence comprises or consists of SEQ ID NO:3, or SEQ ID NO:6.

[0212] The present disclosure also provides isolated genomic nucleic acid molecules comprising or consisting of a nucleotide sequence encoding a WNT5B predicted loss-of-function polypeptide. In some embodiments, the nucleotide sequence of the genomic nucleic acid molecule comprises an adenine at a position corresponding to position 58,170 according to SEQ ID NO:3, or the complement thereof. In some embodiments, the isolated genomic nucleic acid molecules comprise or consist of a nucleotide sequence encoding a WNT5B predicted loss-of-function polypeptide, wherein the nucleotide sequence comprises a TGA codon at positions corresponding to positions 58,168-58,170 according to SEQ ID NO:3.

[0213] The present disclosure also provides isolated genomic nucleic acid molecules comprising or consisting of a nucleotide sequence encoding a WNT5B predicted loss-of-function polypeptide. In some embodiments, the nucleotide sequence of the genomic nucleic acid molecule comprises a deletion of a TC dinucleotide at positions corresponding to positions 71,313-71,314 according to SEQ ID NO:6, or the complement thereof.

[0214] In some embodiments, the isolated genomic nucleic acid molecules comprise or consist of a nucleotide sequence that has at least about 90%, at least about 91%, at least about 92%, at least about 93%, at least about 94%, at least about 95%, at least about 96%, at least about 97%, at least about 98%, or at least about 99% sequence identity to SEQ ID NO:3, and comprises an adenine at a position corresponding to position 58,170 according to SEQ ID NO:3, or the complement thereof. In some embodiments, the isolated genomic nucleic acid molecules comprise or consist of a nucleotide sequence that has at least about 90% sequence identity to SEQ ID NO:3, and comprises an adenine at a position corresponding to position 58,170 according to SEQ ID NO:3, or the complement thereof. In some embodiments, the isolated genomic nucleic acid molecules comprise or consist of a nucleotide sequence that has at least about 92% sequence identity to SEQ ID NO:3, and comprises an adenine at a position corresponding to position 58,170 according to SEQ ID NO:3, or the complement thereof. In some embodiments, the isolated genomic nucleic acid molecules comprise or consist of a nucleotide sequence that has at least about 94% sequence identity to SEQ ID NO:3, and comprises an adenine at a position corresponding to position 58,170 according to SEQ ID NO:3, or the complement thereof. In some embodiments, the isolated genomic nucleic acid molecules comprise or consist of a nucleotide sequence that has at least about 96% sequence identity to SEQ ID NO:3, and comprises an adenine at a position corresponding to position 58,170 according to SEQ ID NO:3, or the complement thereof. In some embodiments, the isolated genomic nucleic acid molecules comprise or consist of a nucleotide sequence that has at least about 98% sequence identity to SEQ ID NO:3, and comprises an adenine at a position corresponding to position 58,170 according to SEQ ID NO:3, or the complement thereof.

[0215] In some embodiments, the isolated genomic nucleic acid molecules comprise or consist of a nucleotide sequence that has at least about 90%, at least about 91%, at least about 92%, at least about 93%, at least about 94%, at least about 95%, at least about 96%, at least about 97%, at least about 98%, or at least about 99% sequence identity to SEQ ID NO:6, and comprises a deletion of a TC dinucleotide at positions corresponding to positions 71,313-71,314 according to SEQ ID NO:6, or the complement thereof. In some embodiments, the isolated genomic nucleic acid molecules comprise or consist of a nucleotide sequence that has at least about 90% sequence identity to SEQ ID NO:6, and comprises a deletion of a TC dinucleotide at positions corresponding to positions 71,313-71,314 according to SEQ ID NO:6, or the complement thereof. In some embodiments, the isolated genomic nucleic acid molecules comprise or consist of a nucleotide sequence that has at least about 92% sequence identity to SEQ ID NO:6, and comprises a deletion of a TC dinucleotide at positions corresponding to positions 71,313-71,314 according to SEQ ID NO:6, or the complement thereof. In some embodiments, the isolated genomic nucleic acid molecules comprise or consist of a nucleotide sequence that has at least about 94% sequence identity to SEQ ID NO:6, and comprises a deletion of a TC dinucleotide at positions corresponding to positions 71,313-71,314 according to SEQ ID NO:6, or the complement thereof. In some embodiments, the isolated genomic nucleic acid molecules comprise or consist of a nucleotide sequence that has at least about 96% sequence identity to SEQ ID NO:6, and comprises a deletion of a TC dinucleotide at positions corresponding to positions 71,313-71,314 according to SEQ ID NO:6, or the complement thereof. In some embodiments, the isolated genomic nucleic acid molecules comprise or consist of a nucleotide sequence that has at least about 98% sequence identity to SEQ ID NO:6, and comprises a deletion of a TC dinucleotide at positions corresponding to positions 71,313-71,314 according to SEQ ID NO:6, or the complement thereof.

[0216] Herein, if reference is made to percent sequence identity, the higher percentages of sequence identity are preferred over the lower ones.

[0217] In some embodiments, the isolated genomic nucleic acid molecules comprise or consist of a nucleotide sequence that has at least about 90%, at least about 91%, at least about 92%, at least about 93%, at least about 94%, at least about 95%, at least about 96%, at least about 97%, at least about 98%, or at least about 99% sequence identity to SEQ ID NO:3, and comprises a TGA codon at positions corresponding to positions 58,168-58,170 according to SEQ ID NO:3, or the complement thereof. In some embodiments, the isolated genomic nucleic acid molecules comprise or consist of a nucleotide sequence that has at least about 90% sequence identity to SEQ ID NO:3, and comprises a TGA codon at positions corresponding to positions 58,168-58,170 according to SEQ ID NO:3, or the complement thereof. In some embodiments, the isolated genomic nucleic acid molecules comprise or consist of a nucleotide sequence that has at least about 92% sequence identity to SEQ ID NO:3, and comprises a TGA codon at positions corresponding to positions 58,168-58,170 according to SEQ ID NO:3, or the complement thereof. In some embodiments, the isolated genomic nucleic acid molecules comprise or consist of a nucleotide sequence that has at least about 94% sequence identity to SEQ ID NO:3, and comprises a TGA codon at positions corresponding to positions 58,168-58,170 according to SEQ ID NO:3, or the complement thereof. In some embodiments, the isolated genomic nucleic acid molecules comprise or consist of a nucleotide sequence that has at least about 96% sequence identity to SEQ ID NO:3, and comprises a TGA codon at positions corresponding to positions 58,168-58,170 according to SEQ ID NO:3, or the complement thereof. In some embodiments, the isolated genomic nucleic acid molecules comprise or consist of a nucleotide sequence that has at least about 98% sequence identity to SEQ ID NO:3, and comprises a TGA codon at positions corresponding to positions 58,168-58,170 according to SEQ ID NO:3, or the complement thereof.

[0218] Herein, if reference is made to percent sequence identity, the higher percentages of sequence identity are preferred over the lower ones.

[0219] In some embodiments, the isolated genomic nucleic acid molecule comprises SEQ ID NO:3. In some embodiments, the isolated genomic nucleic acid molecule consists of SEQ ID NO:3. In some embodiments, the isolated genomic nucleic acid molecule comprises SEQ ID NO:6. In some embodiments, the isolated genomic nucleic acid molecule consists of SEQ ID NO:6.

[0220] In some embodiments, the isolated genomic nucleic acid molecules comprise less than the entire genomic DNA sequence. In some embodiments, the isolated genomic nucleic acid molecules comprise or consist of at least about 15, at least about 20, at least about 25, at least about 30, at least about 35, at least about 40, at least about 45, at least about 50, at least about 60, at least about 70, at least about 80, at least about 90, at least about 100, at least about 200, at least about 300, at least about 400, at least about 500, at least about 600, at least about 700, at least about 800, at least about 900, at least about 1000, at least about 2000, at least about 3000, at least about 4000, at least about 5000, at least about 6000, at least about 7000, at least about 8000, at least about 9000, or at least about 10000 contiguous nucleotides of any of the WNT5B genomic nucleic acid molecules disclosed herein. In some embodiments, the isolated genomic nucleic acid molecules comprise or consist of at least about 1000 to at least about 2000 contiguous nucleotides of any of the WNT5B genomic nucleic acid molecules disclosed herein. In some embodiments, these isolated genomic nucleic acid molecules comprise an adenine at a position corresponding to position 58,170 according to SEQ ID NO:3. In some embodiments, these isolated genomic nucleic acid molecules comprise a deletion of a TC dinucleotide at positions corresponding to positions 71,313-71,314 according to SEQ ID NO:6.

[0221] The nucleotide sequence of a WNT5B reference mRNA molecule is set forth in SEQ ID NO:7. Referring to SEQ ID NO:7, position 242 is a cytosine. Referring to SEQ ID NO:7, position 491 is a uracil. Referring to SEQ ID NO:7, position 642 is a cytosine. Referring to SEQ ID NO:7, positions 1,039-1,040 is a UC dinucleotide.

[0222] The nucleotide sequence of another WNT5B reference mRNA molecule is set forth in SEQ ID NO:8. Referring to SEQ ID NO:8, position 145 is a cytosine. Referring to SEQ ID NO:8, position 394 is a uracil. Referring to SEQ ID NO:8, position 545 is a cytosine. Referring to SEQ ID NO:8, position 545 is a cytosine. Referring to SEQ ID NO:8, positions 942-943 is a UC dinucleotide.

[0223] The nucleotide sequence of another WNT5B reference mRNA molecule is set forth in SEQ ID NO:9. Referring to SEQ ID NO:9, position 198 is a cytosine. Referring to SEQ ID NO:9, position 394 is a uracil. Referring to SEQ ID NO:9, position 598 is a cytosine. Referring to SEQ ID NO:9, position 598 is a cytosine. Referring to SEQ ID NO:9, positions 995-996 is a UC dinucleotide.

[0224] The nucleotide sequence of another WNT5B reference mRNA molecule is set forth in SEQ ID NO:10. Referring to SEQ ID NO:10, position 40 is a cytosine. Referring to SEQ ID NO:10, position 289 is a uracil.

[0225] The nucleotide sequence of another WNT5B reference mRNA molecule is set forth in SEQ ID NO:11. Referring to SEQ ID NO:11, position 145 is a cytosine. Referring to SEQ ID NO:11, position 394 is a uracil. Referring to SEQ ID NO:11, position 545 is a cytosine. Referring to SEQ ID NO:11, position 545 is a cytosine. Referring to SEQ ID NO:11, positions 942-943 is a UC dinucleotide.

[0226] The nucleotide sequence of another WNT5B reference mRNA molecule is set forth in SEQ ID NO:12. Referring to SEQ ID NO:12, position 183 is a cytosine. Referring to SEQ ID NO:12, position 432 is a uracil. Referring to SEQ ID NO:12, position 583 is a cytosine. Referring to SEQ ID NO:12, position 583 is a cytosine. Referring to SEQ ID NO:12, positions 980-981 is a UC dinucleotide.

[0227] The nucleotide sequence of another WNT5B reference mRNA molecule is set forth in SEQ ID NO:13. Referring to SEQ ID NO:13, position 543 is a cytosine. Referring to SEQ ID NO:13, position 792 is a uracil. Referring to SEQ ID NO:13, position 943 is a cytosine. Referring to SEQ ID NO:13, position 943 is a cytosine.

[0228] The nucleotide sequence of another WNT5B reference mRNA molecule is set forth in SEQ ID NO:14. Referring to SEQ ID NO:14, position 254 is a uracil. Referring to SEQ ID NO:14, position 405 is a cytosine. Referring to SEQ ID NO:14, position 405 is a cytosine. Referring to SEQ ID NO:14, positions 802-803 is a UC dinucleotide.

[0229] A WNT5B variant mRNA molecule exists, wherein the cytosine at position 242 is replaced with a uracil. The nucleotide sequence of this WNT5B variant mRNA molecule is set forth in SEQ ID NO:15.

[0230] Another WNT5B variant mRNA molecule exists, wherein the cytosine at position 145 is replaced with a uracil. The nucleotide sequence of this WNT5B variant mRNA molecule is set forth in SEQ ID NO:16.

[0231] Another WNT5B variant mRNA molecule exists, wherein the cytosine at position 198 is replaced with a uracil. The nucleotide sequence of this WNT5B variant mRNA molecule is set forth in SEQ ID NO:17.

[0232] Another WNT5B variant mRNA molecule exists, wherein the cytosine at position 40 is replaced with a uracil. The nucleotide sequence of this WNT5B variant mRNA molecule is set forth in SEQ ID NO:18.

[0233] Another WNT5B variant mRNA molecule exists, wherein the cytosine at position 145 is replaced with a uracil. The nucleotide sequence of this WNT5B variant mRNA molecule is set forth in SEQ ID NO:19.

[0234] Another WNT5B variant mRNA molecule exists, wherein the cytosine at position 183 is replaced with a uracil. The nucleotide sequence of this WNT5B variant mRNA molecule is set forth in SEQ ID NO:20.

[0235] Another WNT5B variant mRNA molecule exists, wherein the cytosine at position 543 is replaced with a uracil. The nucleotide sequence of this WNT5B variant mRNA molecule is set forth in SEQ ID NO:21.

[0236] Another WNT5B variant mRNA molecule exists, wherein the uracil at position 491 is replaced with an adenine. The nucleotide sequence of this WNT5B variant mRNA molecule is set forth in SEQ ID NO:22.

[0237] Another WNT5B variant mRNA molecule exists, wherein the uracil at position 394 is replaced with an adenine. The nucleotide sequence of this WNT5B variant mRNA molecule is set forth in SEQ ID NO:23.

[0238] Another WNT5B variant mRNA molecule exists, wherein the uracil at position 394 is replaced with an adenine. The nucleotide sequence of this WNT5B variant mRNA molecule is set forth in SEQ ID NO:24.

[0239] Another WNT5B variant mRNA molecule exists, wherein the uracil at position 289 is replaced with an adenine. The nucleotide sequence of this WNT5B variant mRNA molecule is set forth in SEQ ID NO:25.

[0240] Another WNT5B variant mRNA molecule exists, wherein the uracil at position 394 is replaced with an adenine. The nucleotide sequence of this WNT5B variant mRNA molecule is set forth in SEQ ID NO:26.

[0241] Another WNT5B variant mRNA molecule exists, wherein the uracil at position 432 is replaced with an adenine. The nucleotide sequence of this WNT5B variant mRNA molecule is set forth in SEQ ID NO:27.

[0242] Another WNT5B variant mRNA molecule exists, wherein the uracil at position 792 is replaced with an adenine. The nucleotide sequence of this WNT5B variant mRNA molecule is set forth in SEQ ID NO:28.

[0243] Another WNT5B variant mRNA molecule exists, wherein the uracil at position 254 is replaced with an adenine. The nucleotide sequence of this WNT5B variant mRNA molecule is set forth in SEQ ID NO:29.

[0244] Another WNT5B variant mRNA molecule exists, wherein the cytosine at position 642 is replaced with a uracil. The nucleotide sequence of this WNT5B variant mRNA molecule is set forth in SEQ ID NO:30.

[0245] Another WNT5B variant mRNA molecule exists, wherein the cytosine at position 545 is replaced with a uracil. The nucleotide sequence of this WNT5B variant mRNA molecule is set forth in SEQ ID NO:31.

[0246] Another WNT5B variant mRNA molecule exists, wherein the cytosine at position 598 is replaced with a uracil. The nucleotide sequence of this WNT5B variant mRNA molecule is set forth in SEQ ID NO:32.

[0247] Another WNT5B variant mRNA molecule exists, wherein the cytosine at position 545 is replaced with a uracil. The nucleotide sequence of this WNT5B variant mRNA molecule is set forth in SEQ ID NO:33.

[0248] Another WNT5B variant mRNA molecule exists, wherein the cytosine at position 583 is replaced with a uracil. The nucleotide sequence of this WNT5B variant mRNA molecule is set forth in SEQ ID NO:34.

[0249] Another WNT5B variant mRNA molecule exists, wherein the cytosine at position 943 is replaced with a uracil. The nucleotide sequence of this WNT5B variant mRNA molecule is set forth in SEQ ID NO:35.

[0250] Another WNT5B variant mRNA molecule exists, wherein the cytosine at position 405 is replaced with a uracil. The nucleotide sequence of this WNT5B variant mRNA molecule is set forth in SEQ ID NO:36.

[0251] Another WNT5B variant mRNA molecule exists, wherein the cytosine at position 642 is replaced with an adenine. The nucleotide sequence of this WNT5B variant mRNA molecule is set forth in SEQ ID NO:37.

[0252] Another WNT5B variant mRNA molecule exists, wherein the cytosine at position 545 is replaced with an adenine. The nucleotide sequence of this WNT5B variant mRNA molecule is set forth in SEQ ID NO:38.

[0253] Another WNT5B variant mRNA molecule exists, wherein the cytosine at position 598 is replaced with an adenine. The nucleotide sequence of this WNT5B variant mRNA molecule is set forth in SEQ ID NO:39.

[0254] Another WNT5B variant mRNA molecule exists, wherein the cytosine at position 545 is replaced with an adenine. The nucleotide sequence of this WNT5B variant mRNA molecule is set forth in SEQ ID NO:40.

[0255] Another WNT5B variant mRNA molecule exists, wherein the cytosine at position 583 is replaced with an adenine. The nucleotide sequence of this WNT5B variant mRNA molecule is set forth in SEQ ID NO:41.

[0256] Another WNT5B variant mRNA molecule exists, wherein the cytosine at position 943 is replaced with an adenine. The nucleotide sequence of this WNT5B variant mRNA molecule is set forth in SEQ ID NO:42.

[0257] Another WNT5B variant mRNA molecule exists, wherein the cytosine at position 405 is replaced with an adenine. The nucleotide sequence of this WNT5B variant mRNA molecule is set forth in SEQ ID NO:43.

[0258] Another WNT5B variant mRNA molecule exists, wherein the UC dinucleotide at positions 1,039-1,040 is deleted. The nucleotide sequence of this WNT5B variant mRNA molecule is set forth in SEQ ID NO:44.

[0259] Another WNT5B variant mRNA molecule exists, wherein the UC dinucleotide at positions 942-943 is deleted. The nucleotide sequence of this WNT5B variant mRNA molecule is set forth in SEQ ID NO:45.

[0260] Another WNT5B variant mRNA molecule exists, wherein the UC dinucleotide at positions 995-996 is deleted. The nucleotide sequence of this WNT5B variant mRNA molecule is set forth in SEQ ID NO:46.

[0261] Another WNT5B variant mRNA molecule exists, wherein the UC dinucleotide at positions 942-943 is deleted. The nucleotide sequence of this WNT5B variant mRNA molecule is set forth in SEQ ID NO:47.

[0262] Another WNT5B variant mRNA molecule exists, wherein the UC dinucleotide at positions 980-981 is deleted. The nucleotide sequence of this WNT5B variant mRNA molecule is set forth in SEQ ID NO:48.

[0263] Another WNT5B variant mRNA molecule exists, wherein the UC dinucleotide at positions 802-803 is deleted. The nucleotide sequence of this WNT5B variant mRNA molecule is set forth in SEQ ID NO:49.

[0264] The present disclosure also provides isolated mRNA molecules comprising or consisting of a nucleotide sequence encoding a WNT5B predicted loss-of-function polypeptide, or the complement thereof, wherein the nucleotide sequence comprises: an adenine at a position corresponding to position 491 according to SEQ ID NO:22, or the complement thereof; an adenine at a position corresponding to position 394 according to SEQ ID NO:23, or the complement thereof; an adenine at a position corresponding to position 447 according to SEQ ID NO:24, or the complement thereof; an adenine at a position corresponding to position 289 according to SEQ ID NO:25, or the complement thereof; an adenine at a position corresponding to position 394 according to SEQ ID NO:26, or the complement thereof; an adenine at a position corresponding to position 432 according to SEQ ID NO:27, or the complement thereof; an adenine at a position corresponding to position 792 according to SEQ ID NO:28, or the complement thereof; an adenine at a position corresponding to position 254 according to SEQ ID NO:29, or the complement thereof; a deletion of a UC dinucleotide at positions corresponding to positions 1,039-1,040 according to SEQ ID NO:44, or the complement thereof; a deletion of a UC dinucleotide at positions corresponding to positions 942-943 according to SEQ ID NO:45, or the complement thereof; a deletion of a UC dinucleotide at positions corresponding to positions 995-996 according to SEQ ID NO:46, or the complement thereof; a deletion of a UC dinucleotide at positions corresponding to positions 942-943 according to SEQ ID NO:47, or the complement thereof; a deletion of a UC dinucleotide at positions corresponding to positions 980-981 according to SEQ ID NO:48, or the complement thereof; or a deletion of a UC dinucleotide at positions corresponding to positions 802-803 according to SEQ ID NO:49, or the complement thereof.

[0265] In some embodiments, the nucleotide sequence comprises: a UGA codon at positions corresponding to positions 489-491 according to SEQ ID NO:22; a UGA codon at positions corresponding to positions 392-394 according to SEQ ID NO:23; a UGA codon at positions corresponding to positions 445-447 according to SEQ ID NO:24; a UGA codon at positions corresponding to positions 287-289 according to SEQ ID NO:25; a UGA codon at positions corresponding to positions 392-394 according to SEQ ID NO:26; a UGA codon at positions corresponding to positions 430-432 according to SEQ ID NO:27; a UGA codon at positions corresponding to positions 790-792 according to SEQ ID NO:28; a UGA codon at positions corresponding to positions 252-254 according to SEQ ID NO:29.

[0266] In some embodiments, the nucleotide sequence of the mRNA molecule has at least 90% sequence identity to: SEQ ID NO:22, and comprises an adenine at a position corresponding to position 491 according to SEQ ID NO:22, or the complement thereof; SEQ ID NO:23, and comprises an adenine at a position corresponding to position 394 according to SEQ ID NO:23, or the complement thereof; SEQ ID NO:24, and comprises an adenine at a position corresponding to position 447 according to SEQ ID NO:24, or the complement thereof; SEQ ID NO:25, and comprises an adenine at a position corresponding to position 289 according to SEQ ID NO:25, or the complement thereof; SEQ ID NO:26, and comprises an adenine at a position corresponding to position 394 according to SEQ ID NO:26, or the complement thereof; SEQ ID NO:27, and comprises an adenine at a position corresponding to position 432 according to SEQ ID NO:27, or the complement thereof; SEQ ID NO:28, and comprises an adenine at a position corresponding to position 792 according to SEQ ID NO:28, or the complement thereof; SEQ ID NO:29, and comprises an adenine at a position corresponding to position 254 according to SEQ ID NO:29, or the complement thereof; SEQ ID NO:44, and comprises a deletion of a UC dinucleotide at positions corresponding to positions 1,039-1,040 according to SEQ ID NO:44, or the complement thereof; SEQ ID NO:45, and comprises a deletion of a UC dinucleotide at positions corresponding to positions 942-943 according to SEQ ID NO:45, or the complement thereof; SEQ ID NO:46, and comprises a deletion of a UC dinucleotide at positions corresponding to positions 995-996 according to SEQ ID NO:46, or the complement thereof; SEQ ID NO:47, and comprises a deletion of a UC dinucleotide at positions corresponding to positions 942-943 according to SEQ ID NO:47, or the complement thereof; SEQ ID NO:48, and comprises a deletion of a UC dinucleotide at positions corresponding to positions 980-981 according to SEQ ID NO:48, or the complement thereof; SEQ ID NO:49, and comprises a deletion of a UC dinucleotide at positions corresponding to positions 802-803 according to SEQ ID NO:49, or the complement thereof.

[0267] In some embodiments, the nucleotide sequence of the mRNA molecule has at least 90% sequence identity to: SEQ ID NO:22, and comprises a UGA codon at positions corresponding to positions 489-491 according to SEQ ID NO:22; SEQ ID NO:23, and comprises a UGA codon at positions corresponding to positions 392-394 according to SEQ ID NO:23; SEQ ID NO:24, and comprises a UGA codon at positions corresponding to positions 445-447 according to SEQ ID NO:24; SEQ ID NO:25, and comprises a UGA codon at positions corresponding to positions 287-289 according to SEQ ID NO:25; SEQ ID NO:26, and comprises a UGA codon at positions corresponding to positions 392-394 according to SEQ ID NO:26; SEQ ID NO:27, and comprises a UGA codon at positions corresponding to positions 430-432 according to SEQ ID NO:27; SEQ ID NO:28, and comprises a UGA codon at positions corresponding to positions 790-792 according to SEQ ID NO:28; SEQ ID NO:29, and comprises a UGA codon at positions corresponding to positions 252-254 according to SEQ ID NO:29.

[0268] In some embodiments, the nucleotide sequence comprises or consists of SEQ ID NO:22, SEQ ID NO:23, SEQ ID NO:24, SEQ ID NO:25, SEQ ID NO:26, SEQ ID NO:27, SEQ ID NO:28, SEQ ID NO:29, SEQ ID NO:44, SEQ ID NO:45, SEQ ID NO:46, SEQ ID NO:47, SEQ ID NO:48, or SEQ ID NO:49.

[0269] The present disclosure also provides isolated mRNA molecules comprising or consisting of a nucleotide sequence encoding a WNT5B predicted loss-of-function polypeptide, or the complement thereof, wherein the nucleotide sequence comprises an adenine at a position corresponding to position 491 according to SEQ ID NO:22, or the complement thereof. In some embodiments, the isolated mRNA molecule comprises or consists of a nucleotide sequence encoding a WNT5B polypeptide, wherein the nucleotide sequence comprises a UGA codon at positions corresponding to positions 489-491 according to SEQ ID NO:22.

[0270] The present disclosure also provides isolated mRNA molecules comprising or consisting of a nucleotide sequence encoding a WNT5B predicted loss-of-function polypeptide, or the complement thereof, wherein the nucleotide sequence comprises an adenine at a position corresponding to position 394 according to SEQ ID NO:23, or the complement thereof. In some embodiments, the isolated mRNA molecule comprises or consists of a nucleotide sequence encoding a WNT5B polypeptide, wherein the nucleotide sequence comprises a UGA codon at positions corresponding to positions 392-394 according to SEQ ID NO:23.

[0271] The present disclosure also provides isolated mRNA molecules comprising or consisting of a nucleotide sequence encoding a WNT5B predicted loss-of-function polypeptide, or the complement thereof, wherein the nucleotide sequence comprises an adenine at a position corresponding to position 447 according to SEQ ID NO:24, or the complement thereof. In some embodiments, the isolated mRNA molecule comprises or consists of a nucleotide sequence encoding a WNT5B polypeptide, wherein the nucleotide sequence comprises a UGA codon at positions corresponding to positions 445-447 according to SEQ ID NO:24.

[0272] The present disclosure also provides isolated mRNA molecules comprising or consisting of a nucleotide sequence encoding a WNT5B predicted loss-of-function polypeptide, or the complement thereof, wherein the nucleotide sequence comprises an adenine at a position corresponding to position 289 according to SEQ ID NO:25, or the complement thereof. In some embodiments, the isolated mRNA molecule comprises or consists of a nucleotide sequence encoding a WNT5B polypeptide, wherein the nucleotide sequence comprises a UGA codon at positions corresponding to positions 287-289 according to SEQ ID NO:25.

[0273] The present disclosure also provides isolated mRNA molecules comprising or consisting of a nucleotide sequence encoding a WNT5B predicted loss-of-function polypeptide, or the complement thereof, wherein the nucleotide sequence comprises an adenine at a position corresponding to position 394 according to SEQ ID NO:26, or the complement thereof. In some embodiments, the isolated mRNA molecule comprises or consists of a nucleotide sequence encoding a WNT5B polypeptide, wherein the nucleotide sequence comprises a UGA codon at positions corresponding to positions 392-394 according to SEQ ID NO:26.

[0274] The present disclosure also provides isolated mRNA molecules comprising or consisting of a nucleotide sequence encoding a WNT5B predicted loss-of-function polypeptide, or the complement thereof, wherein the nucleotide sequence comprises an adenine at a position corresponding to position 432 according to SEQ ID NO:27, or the complement thereof. In some embodiments, the isolated mRNA molecule comprises or consists of a nucleotide sequence encoding a WNT5B polypeptide, wherein the nucleotide sequence comprises a UGA codon at positions corresponding to positions 430-432 according to SEQ ID NO:27.

[0275] The present disclosure also provides isolated mRNA molecules comprising or consisting of a nucleotide sequence encoding a WNT5B predicted loss-of-function polypeptide, or the complement thereof, wherein the nucleotide sequence comprises an adenine at a position corresponding to position 792 according to SEQ ID NO:28, or the complement thereof. In some embodiments, the isolated mRNA molecule comprises or consists of a nucleotide sequence encoding a WNT5B polypeptide, wherein the nucleotide sequence comprises a UGA codon at positions corresponding to positions 790-792 according to SEQ ID NO:28.

[0276] The present disclosure also provides isolated mRNA molecules comprising or consisting of a nucleotide sequence encoding a WNT5B predicted loss-of-function polypeptide, or the complement thereof, wherein the nucleotide sequence comprises an adenine at a position corresponding to position 254 according to SEQ ID NO:29, or the complement thereof. In some embodiments, the isolated mRNA molecule comprises or consists of a nucleotide sequence encoding a WNT5B polypeptide, wherein the nucleotide sequence comprises a UGA codon at positions corresponding to positions 252-254 according to SEQ ID NO:29.

[0277] The present disclosure also provides isolated mRNA molecules comprising or consisting of a nucleotide sequence encoding a WNT5B predicted loss-of-function polypeptide, or the complement thereof, wherein the nucleotide sequence comprises a deletion of a UC dinucleotide at positions corresponding to positions 1,039-1,040 according to SEQ ID NO:44, or the complement thereof.

[0278] The present disclosure also provides isolated mRNA molecules comprising or consisting of a nucleotide sequence encoding a WNT5B predicted loss-of-function polypeptide, or the complement thereof, wherein the nucleotide sequence comprises a deletion of a UC dinucleotide at positions corresponding to positions 942-943 according to SEQ ID NO:45, or the complement thereof.

[0279] The present disclosure also provides isolated mRNA molecules comprising or consisting of a nucleotide sequence encoding a WNT5B predicted loss-of-function polypeptide, or the complement thereof, wherein the nucleotide sequence comprises a deletion of a UC dinucleotide at positions corresponding to positions 995-996 according to SEQ ID NO:46, or the complement thereof.

[0280] The present disclosure also provides isolated mRNA molecules comprising or consisting of a nucleotide sequence encoding a WNT5B predicted loss-of-function polypeptide, or the complement thereof, wherein the nucleotide sequence comprises a deletion of a UC dinucleotide at positions corresponding to positions 942-943 according to SEQ ID NO:47, or the complement thereof.

[0281] The present disclosure also provides isolated mRNA molecules comprising or consisting of a nucleotide sequence encoding a WNT5B predicted loss-of-function polypeptide, or the complement thereof, wherein the nucleotide sequence comprises a deletion of a UC dinucleotide at positions corresponding to positions 980-981 according to SEQ ID NO:48, or the complement thereof.

[0282] The present disclosure also provides isolated mRNA molecules comprising or consisting of a nucleotide sequence encoding a WNT5B predicted loss-of-function polypeptide, or the complement thereof, wherein the nucleotide sequence comprises a deletion of a UC dinucleotide at positions corresponding to positions 802-803 according to SEQ ID NO:49, or the complement thereof.

[0283] In some embodiments, the isolated mRNA molecules comprise or consist of a nucleotide sequence that has at least about 90%, at least about 91%, at least about 92%, at least about 93%, at least about 94%, at least about 95%, at least about 96%, at least about 97%, at least about 98%, or at least about 99% sequence identity to SEQ ID NO:22, and comprises an adenine at a position corresponding to position 491 according to SEQ ID NO:22, or the complement thereof. In some embodiments, the isolated mRNA molecules comprise or consist of a nucleotide sequence that has at least about 90% sequence identity to SEQ ID NO:22, and comprises an adenine at a position corresponding to position 491 according to SEQ ID NO:22, or the complement thereof. In some embodiments, the isolated mRNA molecules comprise or consist of a nucleotide sequence that has at least about 92% sequence identity to SEQ ID NO:22, and comprises an adenine at a position corresponding to position 491 according to SEQ ID NO:22, or the complement thereof. In some embodiments, the isolated mRNA molecules comprise or consist of a nucleotide sequence that has at least about 94% sequence identity to SEQ ID NO:22, and comprises an adenine at a position corresponding to position 491 according to SEQ ID NO:22, or the complement thereof. In some embodiments, the isolated mRNA molecules comprise or consist of a nucleotide sequence that has at least about 96% sequence identity to SEQ ID NO:22, and comprises an adenine at a position corresponding to position 491 according to SEQ ID NO:22, or the complement thereof. In some embodiments, the isolated mRNA molecules comprise or consist of a nucleotide sequence that has at least about 98% sequence identity to SEQ ID NO:22, and comprises an adenine at a position corresponding to position 491 according to SEQ ID NO:22, or the complement thereof.

[0284] In some embodiments, the isolated mRNA molecules comprise or consist of a nucleotide sequence that has at least about 90%, at least about 91%, at least about 92%, at least about 93%, at least about 94%, at least about 95%, at least about 96%, at least about 97%, at least about 98%, or at least about 99% sequence identity to SEQ ID NO:23, and comprises an adenine at a position corresponding to position 394 according to SEQ ID NO:23, or the complement thereof. In some embodiments, the isolated mRNA molecules comprise or consist of a nucleotide sequence that has at least about 90% sequence identity to SEQ ID NO:23, and comprises an adenine at a position corresponding to position 394 according to SEQ ID NO:23, or the complement thereof. In some embodiments, the isolated mRNA molecules comprise or consist of a nucleotide sequence that has at least about 92% sequence identity to SEQ ID NO:23, and comprises an adenine at a position corresponding to position 394 according to SEQ ID NO:23, or the complement thereof. In some embodiments, the isolated mRNA molecules comprise or consist of a nucleotide sequence that has at least about 94% sequence identity to SEQ ID NO:23, and comprises an adenine at a position corresponding to position 394 according to SEQ ID NO:23, or the complement thereof. In some embodiments, the isolated mRNA molecules comprise or consist of a nucleotide sequence that has at least about 96% sequence identity to SEQ ID NO:23, and comprises an adenine at a position corresponding to position 394 according to SEQ ID NO:23, or the complement thereof. In some embodiments, the isolated mRNA molecules comprise or consist of a nucleotide sequence that has at least about 98% sequence identity to SEQ ID NO:23, and comprises an adenine at a position corresponding to position 394 according to SEQ ID NO:23, or the complement thereof.

[0285] In some embodiments, the isolated mRNA molecules comprise or consist of a nucleotide sequence that has at least about 90%, at least about 91%, at least about 92%, at least about 93%, at least about 94%, at least about 95%, at least about 96%, at least about 97%, at least about 98%, or at least about 99% sequence identity to SEQ ID NO:24, and comprises an adenine at a position corresponding to position 447 according to SEQ ID NO:24, or the complement thereof. In some embodiments, the isolated mRNA molecules comprise or consist of a nucleotide sequence that has at least about 90% sequence identity to SEQ ID NO:24, and comprises an adenine at a position corresponding to position 447 according to SEQ ID NO:24, or the complement thereof. In some embodiments, the isolated mRNA molecules comprise or consist of a nucleotide sequence that has at least about 92% sequence identity to SEQ ID NO:24, and comprises an adenine at a position corresponding to position 447 according to SEQ ID NO:24, or the complement thereof. In some embodiments, the isolated mRNA molecules comprise or consist of a nucleotide sequence that has at least about 94% sequence identity to SEQ ID NO:24, and comprises an adenine at a position corresponding to position 447 according to SEQ ID NO:24, or the complement thereof. In some embodiments, the isolated mRNA molecules comprise or consist of a nucleotide sequence that has at least about 96% sequence identity to SEQ ID NO:24, and comprises an adenine at a position corresponding to position 447 according to SEQ ID NO:24, or the complement thereof. In some embodiments, the isolated mRNA molecules comprise or consist of a nucleotide sequence that has at least about 98% sequence identity to SEQ ID NO:24, and comprises an adenine at a position corresponding to position 447 according to SEQ ID NO:24, or the complement thereof.

[0286] In some embodiments, the isolated mRNA molecules comprise or consist of a nucleotide sequence that has at least about 90%, at least about 91%, at least about 92%, at least about 93%, at least about 94%, at least about 95%, at least about 96%, at least about 97%, at least about 98%, or at least about 99% sequence identity to SEQ ID NO:25, and comprises an adenine at a position corresponding to position 289 according to SEQ ID NO:25, or the complement thereof. In some embodiments, the isolated mRNA molecules comprise or consist of a nucleotide sequence that has at least about 90% sequence identity to SEQ ID NO:25, and comprises an adenine at a position corresponding to position 289 according to SEQ ID NO:25, or the complement thereof. In some embodiments, the isolated mRNA molecules comprise or consist of a nucleotide sequence that has at least about 92% sequence identity to SEQ ID NO:25, and comprises an adenine at a position corresponding to position 289 according to SEQ ID NO:25, or the complement thereof. In some embodiments, the isolated mRNA molecules comprise or consist of a nucleotide sequence that has at least about 94% sequence identity to SEQ ID NO:25, and comprises an adenine at a position corresponding to position 289 according to SEQ ID NO:25, or the complement thereof. In some embodiments, the isolated mRNA molecules comprise or consist of a nucleotide sequence that has at least about 96% sequence identity to SEQ ID NO:25, and comprises an adenine at a position corresponding to position 289 according to SEQ ID NO:25, or the complement thereof. In some embodiments, the isolated mRNA molecules comprise or consist of a nucleotide sequence that has at least about 98% sequence identity to SEQ ID NO:25, and comprises an adenine at a position corresponding to position 289 according to SEQ ID NO:25, or the complement thereof.

[0287] In some embodiments, the isolated mRNA molecules comprise or consist of a nucleotide sequence that has at least about 90%, at least about 91%, at least about 92%, at least about 93%, at least about 94%, at least about 95%, at least about 96%, at least about 97%, at least about 98%, or at least about 99% sequence identity to SEQ ID NO:26, and comprises an adenine at a position corresponding to position 394 according to SEQ ID NO:26, or the complement thereof. In some embodiments, the isolated mRNA molecules comprise or consist of a nucleotide sequence that has at least about 90% sequence identity to SEQ ID NO:26, and comprises an adenine at a position corresponding to position 394 according to SEQ ID NO:26, or the complement thereof. In some embodiments, the isolated mRNA molecules comprise or consist of a nucleotide sequence that has at least about 92% sequence identity to SEQ ID NO:26, and comprises an adenine at a position corresponding to position 394 according to SEQ ID NO:26, or the complement thereof. In some embodiments, the isolated mRNA molecules comprise or consist of a nucleotide sequence that has at least about 94% sequence identity to SEQ ID NO:26, and comprises an adenine at a position corresponding to position 394 according to SEQ ID NO:26, or the complement thereof. In some embodiments, the isolated mRNA molecules comprise or consist of a nucleotide sequence that has at least about 96% sequence identity to SEQ ID NO:26, and comprises an adenine at a position corresponding to position 394 according to SEQ ID NO:26, or the complement thereof. In some embodiments, the isolated mRNA molecules comprise or consist of a nucleotide sequence that has at least about 98% sequence identity to SEQ ID NO:26, and comprises an adenine at a position corresponding to position 394 according to SEQ ID NO:26, or the complement thereof.

[0288] In some embodiments, the isolated mRNA molecules comprise or consist of a nucleotide sequence that has at least about 90%, at least about 91%, at least about 92%, at least about 93%, at least about 94%, at least about 95%, at least about 96%, at least about 97%, at least about 98%, or at least about 99% sequence identity to SEQ ID NO:27, and comprises an adenine at a position corresponding to position 432 according to SEQ ID NO:27, or the complement thereof. In some embodiments, the isolated mRNA molecules comprise or consist of a nucleotide sequence that has at least about 90% sequence identity to SEQ ID NO:27, and comprises an adenine at a position corresponding to position 432 according to SEQ ID NO:27, or the complement thereof. In some embodiments, the isolated mRNA molecules comprise or consist of a nucleotide sequence that has at least about 92% sequence identity to SEQ ID NO:27, and comprises an adenine at a position corresponding to position 432 according to SEQ ID NO:27, or the complement thereof. In some embodiments, the isolated mRNA molecules comprise or consist of a nucleotide sequence that has at least about 94% sequence identity to SEQ ID NO:27, and comprises an adenine at a position corresponding to position 432 according to SEQ ID NO:27, or the complement thereof. In some embodiments, the isolated mRNA molecules comprise or consist of a nucleotide sequence that has at least about 96% sequence identity to SEQ ID NO:27, and comprises an adenine at a position corresponding to position 432 according to SEQ ID NO:27, or the complement thereof. In some embodiments, the isolated mRNA molecules comprise or consist of a nucleotide sequence that has at least about 98% sequence identity to SEQ ID NO:27, and comprises an adenine at a position corresponding to position 432 according to SEQ ID NO:27, or the complement thereof.

[0289] In some embodiments, the isolated mRNA molecules comprise or consist of a nucleotide sequence that has at least about 90%, at least about 91%, at least about 92%, at least about 93%, at least about 94%, at least about 95%, at least about 96%, at least about 97%, at least about 98%, or at least about 99% sequence identity to SEQ ID NO:28, and comprises an adenine at a position corresponding to position 792 according to SEQ ID NO:28, or the complement thereof. In some embodiments, the isolated mRNA molecules comprise or consist of a nucleotide sequence that has at least about 90% sequence identity to SEQ ID NO:28, and comprises an adenine at a position corresponding to position 792 according to SEQ ID NO:28, or the complement thereof. In some embodiments, the isolated mRNA molecules comprise or consist of a nucleotide sequence that has at least about 92% sequence identity to SEQ ID NO:28, and comprises an adenine at a position corresponding to position 792 according to SEQ ID NO:28, or the complement thereof. In some embodiments, the isolated mRNA molecules comprise or consist of a nucleotide sequence that has at least about 94% sequence identity to SEQ ID NO:28, and comprises an adenine at a position corresponding to position 792 according to SEQ ID NO:28, or the complement thereof. In some embodiments, the isolated mRNA molecules comprise or consist of a nucleotide sequence that has at least about 96% sequence identity to SEQ ID NO:28, and comprises an adenine at a position corresponding to position 792 according to SEQ ID NO:28, or the complement thereof. In some embodiments, the isolated mRNA molecules comprise or consist of a nucleotide sequence that has at least about 98% sequence identity to SEQ ID NO:28, and comprises an adenine at a position corresponding to position 792 according to SEQ ID NO:28, or the complement thereof.

[0290] In some embodiments, the isolated mRNA molecules comprise or consist of a nucleotide sequence that has at least about 90%, at least about 91%, at least about 92%, at least about 93%, at least about 94%, at least about 95%, at least about 96%, at least about 97%, at least about 98%, or at least about 99% sequence identity to SEQ ID NO:29, and comprises an adenine at a position corresponding to position 254 according to SEQ ID NO:29, or the complement thereof. In some embodiments, the isolated mRNA molecules comprise or consist of a nucleotide sequence that has at least about 90% sequence identity to SEQ ID NO:29, and comprises an adenine at a position corresponding to position 254 according to SEQ ID NO:29, or the complement thereof. In some embodiments, the isolated mRNA molecules comprise or consist of a nucleotide sequence that has at least about 92% sequence identity to SEQ ID NO:29, and comprises an adenine at a position corresponding to position 254 according to SEQ ID NO:29, or the complement thereof. In some embodiments, the isolated mRNA molecules comprise or consist of a nucleotide sequence that has at least about 94% sequence identity to SEQ ID NO:29, and comprises an adenine at a position corresponding to position 254 according to SEQ ID NO:29, or the complement thereof. In some embodiments, the isolated mRNA molecules comprise or consist of a nucleotide sequence that has at least about 96% sequence identity to SEQ ID NO:29, and comprises an adenine at a position corresponding to position 254 according to SEQ ID NO:29, or the complement thereof. In some embodiments, the isolated mRNA molecules comprise or consist of a nucleotide sequence that has at least about 98% sequence identity to SEQ ID NO:29, and comprises an adenine at a position corresponding to position 254 according to SEQ ID NO:29, or the complement thereof.

[0291] In some embodiments, the isolated mRNA molecules comprise or consist of a nucleotide sequence that has at least about 90%, at least about 91%, at least about 92%, at least about 93%, at least about 94%, at least about 95%, at least about 96%, at least about 97%, at least about 98%, or at least about 99% sequence identity to SEQ ID NO:44, and comprises a deletion of a UC dinucleotide at positions corresponding to positions 1,039-1,040 according to SEQ ID NO:44, or the complement thereof. In some embodiments, the isolated mRNA molecules comprise or consist of a nucleotide sequence that has at least about 90% sequence identity to SEQ ID NO:44, and comprises a deletion of a UC dinucleotide at positions corresponding to positions 1,039-1,040 according to SEQ ID NO:44, or the complement thereof. In some embodiments, the isolated mRNA molecules comprise or consist of a nucleotide sequence that has at least about 92% sequence identity to SEQ ID NO:44, and comprises a deletion of a UC dinucleotide at positions corresponding to positions 1,039-1,040 according to SEQ ID NO:44, or the complement thereof. In some embodiments, the isolated mRNA molecules comprise or consist of a nucleotide sequence that has at least about 94% sequence identity to SEQ ID NO:44, and comprises a deletion of a UC dinucleotide at positions corresponding to positions 1,039-1,040 according to SEQ ID NO:44, or the complement thereof. In some embodiments, the isolated mRNA molecules comprise or consist of a nucleotide sequence that has at least about 96% sequence identity to SEQ ID NO:44, and comprises a deletion of a UC dinucleotide at positions corresponding to positions 1,039-1,040 according to SEQ ID NO:44, or the complement thereof. In some embodiments, the isolated mRNA molecules comprise or consist of a nucleotide sequence that has at least about 98% sequence identity to SEQ ID NO:44, and comprises a deletion of a UC dinucleotide at positions corresponding to positions 1,039-1,040 according to SEQ ID NO:44, or the complement thereof.

[0292] In some embodiments, the isolated mRNA molecules comprise or consist of a nucleotide sequence that has at least about 90%, at least about 91%, at least about 92%, at least about 93%, at least about 94%, at least about 95%, at least about 96%, at least about 97%, at least about 98%, or at least about 99% sequence identity to SEQ ID NO:45, and comprises a deletion of a UC dinucleotide at positions corresponding to positions 942-943 according to SEQ ID NO:45, or the complement thereof. In some embodiments, the isolated mRNA molecules comprise or consist of a nucleotide sequence that has at least about 90% sequence identity to SEQ ID NO:45, and comprises a deletion of a UC dinucleotide at positions corresponding to positions 942-943 according to SEQ ID NO:45, or the complement thereof. In some embodiments, the isolated mRNA molecules comprise or consist of a nucleotide sequence that has at least about 92% sequence identity to SEQ ID NO:45, and comprises a deletion of a UC dinucleotide at positions corresponding to positions 942-943 according to SEQ ID NO:45, or the complement thereof. In some embodiments, the isolated mRNA molecules comprise or consist of a nucleotide sequence that has at least about 94% sequence identity to SEQ ID NO:45, and comprises a deletion of a UC dinucleotide at positions corresponding to positions 942-943 according to SEQ ID NO:45, or the complement thereof. In some embodiments, the isolated mRNA molecules comprise or consist of a nucleotide sequence that has at least about 96% sequence identity to SEQ ID NO:45, and comprises a deletion of a UC dinucleotide at positions corresponding to positions 942-943 according to SEQ ID NO:45, or the complement thereof. In some embodiments, the isolated mRNA molecules comprise or consist of a nucleotide sequence that has at least about 98% sequence identity to SEQ ID NO:45, and comprises a deletion of a UC dinucleotide at positions corresponding to positions 942-943 according to SEQ ID NO:45, or the complement thereof.

[0293] In some embodiments, the isolated mRNA molecules comprise or consist of a nucleotide sequence that has at least about 90%, at least about 91%, at least about 92%, at least about 93%, at least about 94%, at least about 95%, at least about 96%, at least about 97%, at least about 98%, or at least about 99% sequence identity to SEQ ID NO:46, and comprises a deletion of a UC dinucleotide at positions corresponding to positions 995-996 according to SEQ ID NO:46, or the complement thereof. In some embodiments, the isolated mRNA molecules comprise or consist of a nucleotide sequence that has at least about 90% sequence identity to SEQ ID NO:46, and comprises a deletion of a UC dinucleotide at positions corresponding to positions 995-996 according to SEQ ID NO:46, or the complement thereof. In some embodiments, the isolated mRNA molecules comprise or consist of a nucleotide sequence that has at least about 92% sequence identity to SEQ ID NO:46, and comprises a deletion of a UC dinucleotide at positions corresponding to positions 995-996 according to SEQ ID NO:46, or the complement thereof. In some embodiments, the isolated mRNA molecules comprise or consist of a nucleotide sequence that has at least about 94% sequence identity to SEQ ID NO:46, and comprises a deletion of a UC dinucleotide at positions corresponding to positions 995-996 according to SEQ ID NO:46, or the complement thereof. In some embodiments, the isolated mRNA molecules comprise or consist of a nucleotide sequence that has at least about 96% sequence identity to SEQ ID NO:46, and comprises a deletion of a UC dinucleotide at positions corresponding to positions 995-996 according to SEQ ID NO:46, or the complement thereof. In some embodiments, the isolated mRNA molecules comprise or consist of a nucleotide sequence that has at least about 98% sequence identity to SEQ ID NO:46, and comprises a deletion of a UC dinucleotide at positions corresponding to positions 995-996 according to SEQ ID NO:46, or the complement thereof.

[0294] In some embodiments, the isolated mRNA molecules comprise or consist of a nucleotide sequence that has at least about 90%, at least about 91%, at least about 92%, at least about 93%, at least about 94%, at least about 95%, at least about 96%, at least about 97%, at least about 98%, or at least about 99% sequence identity to SEQ ID NO:47, and comprises a deletion of a UC dinucleotide at positions corresponding to positions 942-943 according to SEQ ID NO:47, or the complement thereof. In some embodiments, the isolated mRNA molecules comprise or consist of a nucleotide sequence that has at least about 90% sequence identity to SEQ ID NO:47, and comprises a deletion of a UC dinucleotide at positions corresponding to positions 942-943 according to SEQ ID NO:47, or the complement thereof. In some embodiments, the isolated mRNA molecules comprise or consist of a nucleotide sequence that has at least about 92% sequence identity to SEQ ID NO:47, and comprises a deletion of a UC dinucleotide at positions corresponding to positions 942-943 according to SEQ ID NO:47, or the complement thereof. In some embodiments, the isolated mRNA molecules comprise or consist of a nucleotide sequence that has at least about 94% sequence identity to SEQ ID NO:47, and comprises a deletion of a UC dinucleotide at positions corresponding to positions 942-943 according to SEQ ID NO:47, or the complement thereof. In some embodiments, the isolated mRNA molecules comprise or consist of a nucleotide sequence that has at least about 96% sequence identity to SEQ ID NO:47, and comprises a deletion of a UC dinucleotide at positions corresponding to positions 942-943 according to SEQ ID NO:47, or the complement thereof. In some embodiments, the isolated mRNA molecules comprise or consist of a nucleotide sequence that has at least about 98% sequence identity to SEQ ID NO:47, and comprises a deletion of a UC dinucleotide at positions corresponding to positions 942-943 according to SEQ ID NO:47, or the complement thereof.

[0295] In some embodiments, the isolated mRNA molecules comprise or consist of a nucleotide sequence that has at least about 90%, at least about 91%, at least about 92%, at least about 93%, at least about 94%, at least about 95%, at least about 96%, at least about 97%, at least about 98%, or at least about 99% sequence identity to SEQ ID NO:48, and comprises a deletion of a UC dinucleotide at positions corresponding to positions 980-981 according to SEQ ID NO:48, or the complement thereof. In some embodiments, the isolated mRNA molecules comprise or consist of a nucleotide sequence that has at least about 90% sequence identity to SEQ ID NO:48, and comprises a deletion of a UC dinucleotide at positions corresponding to positions 980-981 according to SEQ ID NO:48, or the complement thereof. In some embodiments, the isolated mRNA molecules comprise or consist of a nucleotide sequence that has at least about 92% sequence identity to SEQ ID NO:48, and comprises a deletion of a UC dinucleotide at positions corresponding to positions 980-981 according to SEQ ID NO:48, or the complement thereof. In some embodiments, the isolated mRNA molecules comprise or consist of a nucleotide sequence that has at least about 94% sequence identity to SEQ ID NO:48, and comprises a deletion of a UC dinucleotide at positions corresponding to positions 980-981 according to SEQ ID NO:48, or the complement thereof. In some embodiments, the isolated mRNA molecules comprise or consist of a nucleotide sequence that has at least about 96% sequence identity to SEQ ID NO:48, and comprises a deletion of a UC dinucleotide at positions corresponding to positions 980-981 according to SEQ ID NO:48, or the complement thereof. In some embodiments, the isolated mRNA molecules comprise or consist of a nucleotide sequence that has at least about 98% sequence identity to SEQ ID NO:48, and comprises a deletion of a UC dinucleotide at positions corresponding to positions 980-981 according to SEQ ID NO:48, or the complement thereof.

[0296] In some embodiments, the isolated mRNA molecules comprise or consist of a nucleotide sequence that has at least about 90%, at least about 91%, at least about 92%, at least about 93%, at least about 94%, at least about 95%, at least about 96%, at least about 97%, at least about 98%, or at least about 99% sequence identity to SEQ ID NO:49, and comprises a deletion of a UC dinucleotide at positions corresponding to positions 802-803 according to SEQ ID NO:49, or the complement thereof. In some embodiments, the isolated mRNA molecules comprise or consist of a nucleotide sequence that has at least about 90% sequence identity to SEQ ID NO:49, and comprises a deletion of a UC dinucleotide at positions corresponding to positions 802-803 according to SEQ ID NO:49, or the complement thereof. In some embodiments, the isolated mRNA molecules comprise or consist of a nucleotide sequence that has at least about 92% sequence identity to SEQ ID NO:49, and comprises a deletion of a UC dinucleotide at positions corresponding to positions 802-803 according to SEQ ID NO:49, or the complement thereof. In some embodiments, the isolated mRNA molecules comprise or consist of a nucleotide sequence that has at least about 94% sequence identity to SEQ ID NO:49, and comprises a deletion of a UC dinucleotide at positions corresponding to positions 802-803 according to SEQ ID NO:49, or the complement thereof. In some embodiments, the isolated mRNA molecules comprise or consist of a nucleotide sequence that has at least about 96% sequence identity to SEQ ID NO:49, and comprises a deletion of a UC dinucleotide at positions corresponding to positions 802-803 according to SEQ ID NO:49, or the complement thereof. In some embodiments, the isolated mRNA molecules comprise or consist of a nucleotide sequence that has at least about 98% sequence identity to SEQ ID NO:49, and comprises a deletion of a UC dinucleotide at positions corresponding to positions 802-803 according to SEQ ID NO:49, or the complement thereof.

[0297] Herein, if reference is made to percent sequence identity, the higher percentages of sequence identity are preferred over the lower ones.

[0298] In some embodiments, the isolated mRNA molecules comprise or consist of a nucleotide sequence that has at least about 90%, at least about 91%, at least about 92%, at least about 93%, at least about 94%, at least about 95%, at least about 96%, at least about 97%, at least about 98%, or at least about 99% sequence identity to SEQ ID NO:22, and comprises a UGA codon at positions corresponding to positions 489-491 according to SEQ ID NO:22, or the complement thereof. In some embodiments, the isolated mRNA molecules comprise or consist of a nucleotide sequence that has at least about 90% sequence identity to SEQ ID NO:22, and comprises a UGA codon at positions corresponding to positions 489-491 according to SEQ ID NO:22, or the complement thereof. In some embodiments, the isolated mRNA molecules comprise or consist of a nucleotide sequence that has at least about 92% sequence identity to SEQ ID NO:22, and comprises a UGA codon at positions corresponding to positions 489-491 according to SEQ ID NO:22, or the complement thereof. In some embodiments, the isolated mRNA molecules comprise or consist of a nucleotide sequence that has at least about 94% sequence identity to SEQ ID NO:22, and comprises a UGA codon at positions corresponding to positions 489-491 according to SEQ ID NO:22, or the complement thereof. In some embodiments, the isolated mRNA molecules comprise or consist of a nucleotide sequence that has at least about 96% sequence identity to SEQ ID NO:22, and comprises a UGA codon at positions corresponding to positions 489-491 according to SEQ ID NO:22, or the complement thereof. In some embodiments, the isolated mRNA molecules comprise or consist of a nucleotide sequence that has at least about 98% sequence identity to SEQ ID NO:22, and comprises a UGA codon at positions corresponding to positions 489-491 according to SEQ ID NO:22, or the complement thereof.

[0299] In some embodiments, the isolated mRNA molecules comprise or consist of a nucleotide sequence that has at least about 90%, at least about 91%, at least about 92%, at least about 93%, at least about 94%, at least about 95%, at least about 96%, at least about 97%, at least about 98%, or at least about 99% sequence identity to SEQ ID NO:23, and comprises a UGA codon at positions corresponding to positions 392-394 according to SEQ ID NO:23, or the complement thereof. In some embodiments, the isolated mRNA molecules comprise or consist of a nucleotide sequence that has at least about 90% sequence identity to SEQ ID NO:23, and comprises a UGA codon at positions corresponding to positions 392-394 according to SEQ ID NO:23, or the complement thereof. In some embodiments, the isolated mRNA molecules comprise or consist of a nucleotide sequence that has at least about 92% sequence identity to SEQ ID NO:23, and comprises a UGA codon at positions corresponding to positions 392-394 according to SEQ ID NO:23, or the complement thereof. In some embodiments, the isolated mRNA molecules comprise or consist of a nucleotide sequence that has at least about 94% sequence identity to SEQ ID NO:23, and comprises a UGA codon at positions corresponding to positions 392-394 according to SEQ ID NO:23, or the complement thereof. In some embodiments, the isolated mRNA molecules comprise or consist of a nucleotide sequence that has at least about 96% sequence identity to SEQ ID NO:23, and comprises a UGA codon at positions corresponding to positions 392-394 according to SEQ ID NO:23, or the complement thereof. In some embodiments, the isolated mRNA molecules comprise or consist of a nucleotide sequence that has at least about 98% sequence identity to SEQ ID NO:23, and comprises a UGA codon at positions corresponding to positions 392-394 according to SEQ ID NO:23, or the complement thereof.

[0300] In some embodiments, the isolated mRNA molecules comprise or consist of a nucleotide sequence that has at least about 90%, at least about 91%, at least about 92%, at least about 93%, at least about 94%, at least about 95%, at least about 96%, at least about 97%, at least about 98%, or at least about 99% sequence identity to SEQ ID NO:24, and comprises a UGA codon at positions corresponding to positions 445-447 according to SEQ ID NO:24, or the complement thereof. In some embodiments, the isolated mRNA molecules comprise or consist of a nucleotide sequence that has at least about 90% sequence identity to SEQ ID NO:24, and comprises a UGA codon at positions corresponding to positions 445-447 according to SEQ ID NO:24, or the complement thereof. In some embodiments, the isolated mRNA molecules comprise or consist of a nucleotide sequence that has at least about 92% sequence identity to SEQ ID NO:24, and comprises a UGA codon at positions corresponding to positions 445-447 according to SEQ ID NO:24, or the complement thereof. In some embodiments, the isolated mRNA molecules comprise or consist of a nucleotide sequence that has at least about 94% sequence identity to SEQ ID NO:24, and comprises a UGA codon at positions corresponding to positions 445-447 according to SEQ ID NO:24, or the complement thereof. In some embodiments, the isolated mRNA molecules comprise or consist of a nucleotide sequence that has at least about 96% sequence identity to SEQ ID NO:24, and comprises a UGA codon at positions corresponding to positions 445-447 according to SEQ ID NO:24, or the complement thereof. In some embodiments, the isolated mRNA molecules comprise or consist of a nucleotide sequence that has at least about 98% sequence identity to SEQ ID NO:24, and comprises a UGA codon at positions corresponding to positions 445-447 according to SEQ ID NO:24, or the complement thereof.

[0301] In some embodiments, the isolated mRNA molecules comprise or consist of a nucleotide sequence that has at least about 90%, at least about 91%, at least about 92%, at least about 93%, at least about 94%, at least about 95%, at least about 96%, at least about 97%, at least about 98%, or at least about 99% sequence identity to SEQ ID NO:25, and comprises a UGA codon at positions corresponding to positions 287-289 according to SEQ ID NO:25, or the complement thereof. In some embodiments, the isolated mRNA molecules comprise or consist of a nucleotide sequence that has at least about 90% sequence identity to SEQ ID NO:25, and comprises a UGA codon at positions corresponding to positions 287-289 according to SEQ ID NO:25, or the complement thereof. In some embodiments, the isolated mRNA molecules comprise or consist of a nucleotide sequence that has at least about 92% sequence identity to SEQ ID NO:25, and comprises a UGA codon at positions corresponding to positions 287-289 according to SEQ ID NO:25, or the complement thereof. In some embodiments, the isolated mRNA molecules comprise or consist of a nucleotide sequence that has at least about 94% sequence identity to SEQ ID NO:25, and comprises a UGA codon at positions corresponding to positions 287-289 according to SEQ ID NO:25, or the complement thereof. In some embodiments, the isolated mRNA molecules comprise or consist of a nucleotide sequence that has at least about 96% sequence identity to SEQ ID NO:25, and comprises a UGA codon at positions corresponding to positions 287-289 according to SEQ ID NO:25, or the complement thereof. In some embodiments, the isolated mRNA molecules comprise or consist of a nucleotide sequence that has at least about 98% sequence identity to SEQ ID NO:25, and comprises a UGA codon at positions corresponding to positions 287-289 according to SEQ ID NO:25, or the complement thereof.

[0302] In some embodiments, the isolated mRNA molecules comprise or consist of a nucleotide sequence that has at least about 90%, at least about 91%, at least about 92%, at least about 93%, at least about 94%, at least about 95%, at least about 96%, at least about 97%, at least about 98%, or at least about 99% sequence identity to SEQ ID NO:26, and comprises a UGA codon at positions corresponding to positions 392-394 according to SEQ ID NO:26, or the complement thereof. In some embodiments, the isolated mRNA molecules comprise or consist of a nucleotide sequence that has at least about 90% sequence identity to SEQ ID NO:26, and comprises a UGA codon at positions corresponding to positions 392-394 according to SEQ ID NO:26, or the complement thereof. In some embodiments, the isolated mRNA molecules comprise or consist of a nucleotide sequence that has at least about 92% sequence identity to SEQ ID NO:26, and comprises a UGA codon at positions corresponding to positions 392-394 according to SEQ ID NO:26, or the complement thereof. In some embodiments, the isolated mRNA molecules comprise or consist of a nucleotide sequence that has at least about 94% sequence identity to SEQ ID NO:26, and comprises a UGA codon at positions corresponding to positions 392-394 according to SEQ ID NO:26, or the complement thereof. In some embodiments, the isolated mRNA molecules comprise or consist of a nucleotide sequence that has at least about 96% sequence identity to SEQ ID NO:26, and comprises a UGA codon at positions corresponding to positions 392-394 according to SEQ ID NO:26, or the complement thereof. In some embodiments, the isolated mRNA molecules comprise or consist of a nucleotide sequence that has at least about 98% sequence identity to SEQ ID NO:26, and comprises a UGA codon at positions corresponding to positions 392-394 according to SEQ ID NO:26, or the complement thereof.

[0303] In some embodiments, the isolated mRNA molecules comprise or consist of a nucleotide sequence that has at least about 90%, at least about 91%, at least about 92%, at least about 93%, at least about 94%, at least about 95%, at least about 96%, at least about 97%, at least about 98%, or at least about 99% sequence identity to SEQ ID NO:27, and comprises a UGA codon at positions corresponding to positions 430-432 according to SEQ ID NO:27, or the complement thereof. In some embodiments, the isolated mRNA molecules comprise or consist of a nucleotide sequence that has at least about 90% sequence identity to SEQ ID NO:27, and comprises a UGA codon at positions corresponding to positions 430-432 according to SEQ ID NO:27, or the complement thereof. In some embodiments, the isolated mRNA molecules comprise or consist of a nucleotide sequence that has at least about 92% sequence identity to SEQ ID NO:27, and comprises a UGA codon at positions corresponding to positions 430-432 according to SEQ ID NO:27, or the complement thereof. In some embodiments, the isolated mRNA molecules comprise or consist of a nucleotide sequence that has at least about 94% sequence identity to SEQ ID NO:27, and comprises a UGA codon at positions corresponding to positions 430-432 according to SEQ ID NO:27, or the complement thereof. In some embodiments, the isolated mRNA molecules comprise or consist of a nucleotide sequence that has at least about 96% sequence identity to SEQ ID NO:27, and comprises a UGA codon at positions corresponding to positions 430-432 according to SEQ ID NO:27, or the complement thereof. In some embodiments, the isolated mRNA molecules comprise or consist of a nucleotide sequence that has at least about 98% sequence identity to SEQ ID NO:27, and comprises a UGA codon at positions corresponding to positions 430-432 according to SEQ ID NO:27, or the complement thereof.

[0304] In some embodiments, the isolated mRNA molecules comprise or consist of a nucleotide sequence that has at least about 90%, at least about 91%, at least about 92%, at least about 93%, at least about 94%, at least about 95%, at least about 96%, at least about 97%, at least about 98%, or at least about 99% sequence identity to SEQ ID NO:28, and comprises a UGA codon at positions corresponding to positions 790-792 according to SEQ ID NO:28, or the complement thereof. In some embodiments, the isolated mRNA molecules comprise or consist of a nucleotide sequence that has at least about 90% sequence identity to SEQ ID NO:28, and comprises a UGA codon at positions corresponding to positions 790-792 according to SEQ ID NO:28, or the complement thereof. In some embodiments, the isolated mRNA molecules comprise or consist of a nucleotide sequence that has at least about 92% sequence identity to SEQ ID NO:28, and comprises a UGA codon at positions corresponding to positions 790-792 according to SEQ ID NO:28, or the complement thereof. In some embodiments, the isolated mRNA molecules comprise or consist of a nucleotide sequence that has at least about 94% sequence identity to SEQ ID NO:28, and comprises a UGA codon at positions corresponding to positions 790-792 according to SEQ ID NO:28, or the complement thereof. In some embodiments, the isolated mRNA molecules comprise or consist of a nucleotide sequence that has at least about 96% sequence identity to SEQ ID NO:28, and comprises a UGA codon at positions corresponding to positions 790-792 according to SEQ ID NO:28, or the complement thereof. In some embodiments, the isolated mRNA molecules comprise or consist of a nucleotide sequence that has at least about 98% sequence identity to SEQ ID NO:28, and comprises a UGA codon at positions corresponding to positions 790-792 according to SEQ ID NO:28, or the complement thereof.

[0305] In some embodiments, the isolated mRNA molecules comprise or consist of a nucleotide sequence that has at least about 90%, at least about 91%, at least about 92%, at least about 93%, at least about 94%, at least about 95%, at least about 96%, at least about 97%, at least about 98%, or at least about 99% sequence identity to SEQ ID NO:29, and comprises a UGA codon at positions corresponding to positions 252-254 according to SEQ ID NO:29, or the complement thereof. In some embodiments, the isolated mRNA molecules comprise or consist of a nucleotide sequence that has at least about 90% sequence identity to SEQ ID NO:29, and comprises a UGA codon at positions corresponding to positions 252-254 according to SEQ ID NO:29, or the complement thereof. In some embodiments, the isolated mRNA molecules comprise or consist of a nucleotide sequence that has at least about 92% sequence identity to SEQ ID NO:29, and comprises a UGA codon at positions corresponding to positions 252-254 according to SEQ ID NO:29, or the complement thereof. In some embodiments, the isolated mRNA molecules comprise or consist of a nucleotide sequence that has at least about 94% sequence identity to SEQ ID NO:29, and comprises a UGA codon at positions corresponding to positions 252-254 according to SEQ ID NO:29, or the complement thereof. In some embodiments, the isolated mRNA molecules comprise or consist of a nucleotide sequence that has at least about 96% sequence identity to SEQ ID NO:29, and comprises a UGA codon at positions corresponding to positions 252-254 according to SEQ ID NO:29, or the complement thereof. In some embodiments, the isolated mRNA molecules comprise or consist of a nucleotide sequence that has at least about 98% sequence identity to SEQ ID NO:29, and comprises a UGA codon at positions corresponding to positions 252-254 according to SEQ ID NO:29, or the complement thereof.

[0306] Herein, if reference is made to percent sequence identity, the higher percentages of sequence identity are preferred over the lower ones.

[0307] In some embodiments, the isolated mRNA molecule comprises SEQ ID NO:22. In some embodiments, the isolated mRNA molecule consists of SEQ ID NO:22. In some embodiments, the isolated mRNA molecule comprises SEQ ID NO:23. In some embodiments, the isolated mRNA molecule consists of SEQ ID NO:23. In some embodiments, the isolated mRNA molecule comprises SEQ ID NO:24. In some embodiments, the isolated mRNA molecule consists of SEQ ID NO:24. In some embodiments, the isolated mRNA molecule comprises SEQ ID NO:25. In some embodiments, the isolated mRNA molecule consists of SEQ ID NO:25. In some embodiments, the isolated mRNA molecule comprises SEQ ID NO:26. In some embodiments, the isolated mRNA molecule consists of SEQ ID NO:26. In some embodiments, the isolated mRNA molecule comprises SEQ ID NO:27. In some embodiments, the isolated mRNA molecule consists of SEQ ID NO:27. In some embodiments, the isolated mRNA molecule comprises SEQ ID NO:28. In some embodiments, the isolated mRNA molecule consists of SEQ ID NO:28. In some embodiments, the isolated mRNA molecule comprises SEQ ID NO:29. In some embodiments, the isolated mRNA molecule consists of SEQ ID NO:29.

[0308] In some embodiments, the isolated mRNA molecule comprises SEQ ID NO:44. In some embodiments, the isolated mRNA molecule consists of SEQ ID NO:44. In some embodiments, the isolated mRNA molecule comprises SEQ ID NO:45. In some embodiments, the isolated mRNA molecule consists of SEQ ID NO:45. In some embodiments, the isolated mRNA molecule comprises SEQ ID NO:46. In some embodiments, the isolated mRNA molecule consists of SEQ ID NO:46. In some embodiments, the isolated mRNA molecule comprises SEQ ID NO:47. In some embodiments, the isolated mRNA molecule consists of SEQ ID NO:47. In some embodiments, the isolated mRNA molecule comprises SEQ ID NO:48. In some embodiments, the isolated mRNA molecule consists of SEQ ID NO:48. In some embodiments, the isolated mRNA molecule comprises SEQ ID NO:49. In some embodiments, the isolated mRNA molecule consists of SEQ ID NO:49.

[0309] The nucleotide sequence of a WNT5B reference cDNA molecule is set forth in SEQ ID NO:50. Referring to SEQ ID NO:50, position 242 is a cytosine. Referring to SEQ ID NO:50, position 491 is a thymine. Referring to SEQ ID NO:50, position 642 is a cytosine. Referring to SEQ ID NO:50, positions 1,039-1,040 is a TC dinucleotide.

[0310] The nucleotide sequence of another WNT5B reference cDNA molecule is set forth in SEQ ID NO:51. Referring to SEQ ID NO:51, position 145 is a cytosine. Referring to SEQ ID NO:51, position 394 is a thymine. Referring to SEQ ID NO:51, position 545 is a cytosine. Referring to SEQ ID NO:51, positions 942-943 is a TC dinucleotide.

[0311] The nucleotide sequence of another WNT5B reference cDNA molecule is set forth in SEQ ID NO:52. Referring to SEQ ID NO:52, position 198 is a cytosine. Referring to SEQ ID NO:52, position 447 is a thymine. Referring to SEQ ID NO:52, position 598 is a cytosine. Referring to SEQ ID NO:52, positions 995-996 is a TC dinucleotide.

[0312] The nucleotide sequence of another WNT5B reference cDNA molecule is set forth in SEQ ID NO:53. Referring to SEQ ID NO:53, position 40 is a cytosine. Referring to SEQ ID NO:53, position 289 is a thymine.

[0313] The nucleotide sequence of another WNT5B reference cDNA molecule is set forth in SEQ ID NO:54. Referring to SEQ ID NO:54, position 145 is a cytosine. Referring to SEQ ID NO:54, position 394 is a thymine. Referring to SEQ ID NO:54, position 545 is a cytosine. Referring to SEQ ID NO:54, positions 942-943 is a TC dinucleotide.

[0314] The nucleotide sequence of another WNT5B reference cDNA molecule is set forth in SEQ ID NO:55. Referring to SEQ ID NO:55, position 183 is a cytosine. Referring to SEQ ID NO:55, position 432 is a thymine. Referring to SEQ ID NO:55, position 583 is a cytosine. Referring to SEQ ID NO:55, positions 980-981 is a TC dinucleotide

[0315] The nucleotide sequence of another WNT5B reference cDNA molecule is set forth in SEQ ID NO:56. Referring to SEQ ID NO:56, position 543 is a cytosine. Referring to SEQ ID NO:56, position 792 is a thymine. Referring to SEQ ID NO:56, position 943 is a cytosine.

[0316] The nucleotide sequence of another WNT5B reference cDNA molecule is set forth in SEQ ID NO:57. Referring to SEQ ID NO:57, position 254 is a thymine. Referring to SEQ ID NO:57, position 405 is a cytosine. Referring to SEQ ID NO:57, positions 802-803 is a TC dinucleotide.

[0317] A WNT5B variant cDNA molecule exists, wherein the cytosine at position 242 is replaced with a thymine. The nucleotide sequence of this WNT5B variant cDNA molecule is set forth in SEQ ID NO:58.

[0318] Another WNT5B variant cDNA molecule exists, wherein the cytosine at position 145 is replaced with a thymine. The nucleotide sequence of this WNT5B variant cDNA molecule is set forth in SEQ ID NO:59.

[0319] Another WNT5B variant cDNA molecule exists, wherein the cytosine at position 198 is replaced with a thymine. The nucleotide sequence of this WNT5B variant cDNA molecule is set forth in SEQ ID NO:60.

[0320] Another WNT5B variant cDNA molecule exists, wherein the cytosine at position 40 is replaced with a thymine. The nucleotide sequence of this WNT5B variant cDNA molecule is set forth in SEQ ID NO:61.

[0321] Another WNT5B variant cDNA molecule exists, wherein the cytosine at position 145 is replaced with a thymine. The nucleotide sequence of this WNT5B variant cDNA molecule is set forth in SEQ ID NO:62.

[0322] Another WNT5B variant cDNA molecule exists, wherein the cytosine at position 183 is replaced with a thymine. The nucleotide sequence of this WNT5B variant cDNA molecule is set forth in SEQ ID NO:63.

[0323] Another WNT5B variant cDNA molecule exists, wherein the cytosine at position 543 is replaced with a thymine. The nucleotide sequence of this WNT5B variant cDNA molecule is set forth in SEQ ID NO:64.

[0324] Another WNT5B variant cDNA molecule exists, wherein the thymine at position 145 is replaced with an adenine. The nucleotide sequence of this WNT5B variant cDNA molecule is set forth in SEQ ID NO:65.

[0325] Another WNT5B variant cDNA molecule exists, wherein the thymine at position 491 is replaced with an adenine. The nucleotide sequence of this WNT5B variant cDNA molecule is set forth in SEQ ID NO:66.

[0326] Another WNT5B variant cDNA molecule exists, wherein the thymine at position 447 is replaced with an adenine. The nucleotide sequence of this WNT5B variant cDNA molecule is set forth in SEQ ID NO:67.

[0327] Another WNT5B variant cDNA molecule exists, wherein the thymine at position 289 is replaced with an adenine. The nucleotide sequence of this WNT5B variant cDNA molecule is set forth in SEQ ID NO:68.

[0328] Another WNT5B variant cDNA molecule exists, wherein the thymine at position 394 is replaced with an adenine. The nucleotide sequence of this WNT5B variant cDNA molecule is set forth in SEQ ID NO:69.

[0329] Another WNT5B variant cDNA molecule exists, wherein the thymine at position 432 is replaced with an adenine. The nucleotide sequence of this WNT5B variant cDNA molecule is set forth in SEQ ID NO:70.

[0330] Another WNT5B variant cDNA molecule exists, wherein the thymine at position 792 is replaced with an adenine. The nucleotide sequence of this WNT5B variant cDNA molecule is set forth in SEQ ID NO:71.

[0331] Another WNT5B variant cDNA molecule exists, wherein the thymine at position 254 is replaced with an adenine. The nucleotide sequence of this WNT5B variant cDNA molecule is set forth in SEQ ID NO:72.

[0332] Another WNT5B variant cDNA molecule exists, wherein the cytosine at position 642 is replaced with a thymine. The nucleotide sequence of this WNT5B variant cDNA molecule is set forth in SEQ ID NO:73.

[0333] Another WNT5B variant cDNA molecule exists, wherein the cytosine at position 545 is replaced with a thymine. The nucleotide sequence of this WNT5B variant cDNA molecule is set forth in SEQ ID NO:74.

[0334] Another WNT5B variant cDNA molecule exists, wherein the cytosine at position 598 is replaced with a thymine. The nucleotide sequence of this WNT5B variant cDNA molecule is set forth in SEQ ID NO:75.

[0335] Another WNT5B variant cDNA molecule exists, wherein the cytosine at position 545 is replaced with a thymine. The nucleotide sequence of this WNT5B variant cDNA molecule is set forth in SEQ ID NO:76.

[0336] Another WNT5B variant cDNA molecule exists, wherein the cytosine at position 583 is replaced with a thymine. The nucleotide sequence of this WNT5B variant cDNA molecule is set forth in SEQ ID NO:77.

[0337] Another WNT5B variant cDNA molecule exists, wherein the cytosine at position 943 is replaced with a thymine. The nucleotide sequence of this WNT5B variant cDNA molecule is set forth in SEQ ID NO:78.

[0338] Another WNT5B variant cDNA molecule exists, wherein the cytosine at position 405 is replaced with a thymine. The nucleotide sequence of this WNT5B variant cDNA molecule is set forth in SEQ ID NO:79.

[0339] Another WNT5B variant cDNA molecule exists, wherein the cytosine at position 40 is replaced with an adenine. The nucleotide sequence of this WNT5B variant cDNA molecule is set forth in SEQ ID NO:80.

[0340] Another WNT5B variant cDNA molecule exists, wherein the cytosine at position 545 is replaced with an adenine. The nucleotide sequence of this WNT5B variant cDNA molecule is set forth in SEQ ID NO:81.

[0341] Another WNT5B variant cDNA molecule exists, wherein the cytosine at position 598 is replaced with an adenine. The nucleotide sequence of this WNT5B variant cDNA molecule is set forth in SEQ ID NO:82.

[0342] Another WNT5B variant cDNA molecule exists, wherein the cytosine at position 545 is replaced with an adenine. The nucleotide sequence of this WNT5B variant cDNA molecule is set forth in SEQ ID NO:83.

[0343] Another WNT5B variant cDNA molecule exists, wherein the cytosine at position 583 is replaced with an adenine. The nucleotide sequence of this WNT5B variant cDNA molecule is set forth in SEQ ID NO:84.

[0344] Another WNT5B variant cDNA molecule exists, wherein the cytosine at position 943 is replaced with an adenine. The nucleotide sequence of this WNT5B variant cDNA molecule is set forth in SEQ ID NO:85.

[0345] Another WNT5B variant cDNA molecule exists, wherein the cytosine at position 405 is replaced with an adenine. The nucleotide sequence of this WNT5B variant cDNA molecule is set forth in SEQ ID NO:86.

[0346] Another WNT5B variant cDNA molecule exists, wherein the TC dinucleotide at positions 1,039-1,040 is deleted. The nucleotide sequence of this WNT5B variant cDNA molecule is set forth in SEQ ID NO:87.

[0347] Another WNT5B variant cDNA molecule exists, wherein the TC dinucleotide at positions 942-943 is deleted. The nucleotide sequence of this WNT5B variant cDNA molecule is set forth in SEQ ID NO:88.

[0348] Another WNT5B variant cDNA molecule exists, wherein the TC dinucleotide at positions 995-996 is deleted. The nucleotide sequence of this WNT5B variant cDNA molecule is set forth in SEQ ID NO:89.

[0349] Another WNT5B variant cDNA molecule exists, wherein the TC dinucleotide at positions 942-943 is deleted. The nucleotide sequence of this WNT5B variant cDNA molecule is set forth in SEQ ID NO:90.

[0350] Another WNT5B variant cDNA molecule exists, wherein the TC dinucleotide at positions 980-981 is deleted. The nucleotide sequence of this WNT5B variant cDNA molecule is set forth in SEQ ID NO:91.

[0351] Another WNT5B variant cDNA molecule exists, wherein the TC dinucleotide at positions 802-803 is deleted. The nucleotide sequence of this WNT5B variant cDNA molecule is set forth in SEQ ID NO:92.

[0352] The present disclosure also provides isolated cDNA molecules comprising or consisting of a nucleotide sequence encoding a WNT5B predicted loss-of-function polypeptide, or the complement thereof, wherein the nucleotide sequence comprises: an adenine at a position corresponding to position 491 according to SEQ ID NO:65, or the complement thereof; an adenine at a position corresponding to position 394 according to SEQ ID NO:66, or the complement thereof; an adenine at a position corresponding to position 447 according to SEQ ID NO:67, or the complement thereof; an adenine at a position corresponding to position 289 according to SEQ ID NO:68, or the complement thereof; an adenine at a position corresponding to position 394 according to SEQ ID NO:69, or the complement thereof; an adenine at a position corresponding to position 432 according to SEQ ID NO:70, or the complement thereof; an adenine at a position corresponding to position 792 according to SEQ ID NO:71, or the complement thereof; an adenine at a position corresponding to position 254 according to SEQ ID NO:72, or the complement thereof; a deletion of a TC dinucleotide at positions corresponding to positions 1,039-1,040 according to SEQ ID NO:87, or the complement thereof; a deletion of a TC dinucleotide at positions corresponding to positions 942-943 according to SEQ ID NO:88, or the complement thereof; a deletion of a TC dinucleotide at positions corresponding to positions 995-996 according to SEQ ID NO:89, or the complement thereof; a deletion of a TC dinucleotide at positions corresponding to positions 942-943 according to SEQ ID NO:90, or the complement thereof; a deletion of a TC dinucleotide at positions corresponding to positions 980-981 according to SEQ ID NO:91, or the complement thereof; or a deletion of a TC dinucleotide at positions corresponding to positions 802-803 according to SEQ ID NO:92, or the complement thereof.

[0353] In some embodiments, the nucleotide sequence comprises: a TGA codon at positions corresponding to positions 489-491 according to SEQ ID NO:65; a TGA codon at positions corresponding to positions 392-394 according to SEQ ID NO:66; a TGA codon at positions corresponding to positions 445-447 according to SEQ ID NO:67; a TGA codon at positions corresponding to positions 287-289 according to SEQ ID NO:68; a TGA codon at positions corresponding to positions 392-394 according to SEQ ID NO:69; a TGA codon at positions corresponding to positions 430-432 according to SEQ ID NO:70; a TGA codon at positions corresponding to positions 790-792 according to SEQ ID NO:71; a TGA codon at positions corresponding to positions 252-254 according to SEQ ID NO:72.

[0354] In some embodiments, the nucleotide sequence of the cDNA molecule has at least 90% sequence identity to: SEQ ID NO:65, and comprises an adenine at a position corresponding to position 491 according to SEQ ID NO:65, or the complement thereof; SEQ ID NO:66, and comprises an adenine at a position corresponding to position 394 according to SEQ ID NO:66, or the complement thereof; SEQ ID NO:67, and comprises an adenine at a position corresponding to position 447 according to SEQ ID NO:67, or the complement thereof; SEQ ID NO:68, and comprises an adenine at a position corresponding to position 289 according to SEQ ID NO:68, or the complement thereof; SEQ ID NO:69, and comprises an adenine at a position corresponding to position 394 according to SEQ ID NO:69, or the complement thereof; SEQ ID NO:70, and comprises an adenine at a position corresponding to position 432 according to SEQ ID NO:70, or the complement thereof; SEQ ID NO:71, and comprises an adenine at a position corresponding to position 792 according to SEQ ID NO:71, or the complement thereof; SEQ ID NO:72, and comprises an adenine at a position corresponding to position 254 according to SEQ ID NO:72, or the complement thereof; SEQ ID NO:87, and comprises a deletion of a TC dinucleotide at positions corresponding to positions 1,039-1,040 according to SEQ ID NO:87, or the complement thereof; SEQ ID NO:88, and comprises a deletion of a TC dinucleotide at positions corresponding to positions 942-943 according to SEQ ID NO:88, or the complement thereof; SEQ ID NO:89, and comprises a deletion of a TC dinucleotide at positions corresponding to positions 995-996 according to SEQ ID NO:89, or the complement thereof; SEQ ID NO:90, and comprises a deletion of a TC dinucleotide at positions corresponding to positions 942-943 according to SEQ ID NO:90, or the complement thereof; SEQ ID NO:91, and comprises a deletion of a TC dinucleotide at positions corresponding to positions 980-981 according to SEQ ID NO:91, or the complement thereof; SEQ ID NO:92, and comprises a deletion of a TC dinucleotide at positions corresponding to positions 802-803 according to SEQ ID NO:92, or the complement thereof.

[0355] In some embodiments, the nucleotide sequence of the cDNA molecule has at least 90% sequence identity to: SEQ ID NO:65, and comprises a TGA codon at positions corresponding to positions 489-491 according to SEQ ID NO:65; SEQ ID NO:66, and comprises a TGA codon at positions corresponding to positions 392-394 according to SEQ ID NO:66; SEQ ID NO:67, and comprises a TGA codon at positions corresponding to positions 445-447 according to SEQ ID NO:67; SEQ ID NO:68, and comprises a TGA codon at positions corresponding to positions 287-289 according to SEQ ID NO:68; SEQ ID NO:69, and comprises a TGA codon at positions corresponding to positions 392-394 according to SEQ ID NO:69; SEQ ID NO:70, and comprises a TGA codon at positions corresponding to positions 430-432 according to SEQ ID NO:70; SEQ ID NO:71, and comprises a TGA codon at positions corresponding to positions 790-792 according to SEQ ID NO:71; SEQ ID NO:72, and comprises a TGA codon at positions corresponding to positions 252-254 according to SEQ ID NO:72.

[0356] In some embodiments, the nucleotide sequence comprises or consists of SEQ ID NO:65, SEQ ID NO:66, SEQ ID NO:67, SEQ ID NO:68, SEQ ID NO:69, SEQ ID NO:70, SEQ ID NO:71, SEQ ID NO:72, SEQ ID NO:87, SEQ ID NO:88, SEQ ID NO:89, SEQ ID NO:90, SEQ ID NO:91, SEQ ID NO:92.

[0357] The present disclosure also provides isolated cDNA molecules comprising or consisting of a nucleotide sequence encoding a WNT5B predicted loss-of-function polypeptide, or the complement thereof, wherein the nucleotide sequence comprises an adenine at a position corresponding to position 491 according to SEQ ID NO:65, or the complement thereof. In some embodiments, the isolated cDNA molecule comprises or consists of a nucleotide sequence encoding a WNT5B polypeptide, wherein the nucleotide sequence comprises a TGA codon at positions corresponding to positions 489-491 according to SEQ ID NO:65.

[0358] The present disclosure also provides isolated cDNA molecules comprising or consisting of a nucleotide sequence encoding a WNT5B predicted loss-of-function polypeptide, or the complement thereof, wherein the nucleotide sequence comprises an adenine at a position corresponding to position 394 according to SEQ ID NO:66, or the complement thereof. In some embodiments, the isolated cDNA molecule comprises or consists of a nucleotide sequence encoding a WNT5B polypeptide, wherein the nucleotide sequence comprises a TGA codon at positions corresponding to positions 392-394 according to SEQ ID NO:66.

[0359] The present disclosure also provides isolated cDNA molecules comprising or consisting of a nucleotide sequence encoding a WNT5B predicted loss-of-function polypeptide, or the complement thereof, wherein the nucleotide sequence comprises an adenine at a position corresponding to position 447 according to SEQ ID NO:67, or the complement thereof. In some embodiments, the isolated cDNA molecule comprises or consists of a nucleotide sequence encoding a WNT5B polypeptide, wherein the nucleotide sequence comprises a TGA codon at positions corresponding to positions 445-447 according to SEQ ID NO:67.

[0360] The present disclosure also provides isolated cDNA molecules comprising or consisting of a nucleotide sequence encoding a WNT5B predicted loss-of-function polypeptide, or the complement thereof, wherein the nucleotide sequence comprises an adenine at a position corresponding to position 289 according to SEQ ID NO:68, or the complement thereof. In some embodiments, the isolated cDNA molecule comprises or consists of a nucleotide sequence encoding a WNT5B polypeptide, wherein the nucleotide sequence comprises a TGA codon at positions corresponding to positions 287-289 according to SEQ ID NO:68.

[0361] The present disclosure also provides isolated cDNA molecules comprising or consisting of a nucleotide sequence encoding a WNT5B predicted loss-of-function polypeptide, or the complement thereof, wherein the nucleotide sequence comprises an adenine at a position corresponding to position 394 according to SEQ ID NO:69, or the complement thereof. In some embodiments, the isolated cDNA molecule comprises or consists of a nucleotide sequence encoding a WNT5B polypeptide, wherein the nucleotide sequence comprises a TGA codon at positions corresponding to positions 392-394 according to SEQ ID NO:69.

[0362] The present disclosure also provides isolated cDNA molecules comprising or consisting of a nucleotide sequence encoding a WNT5B predicted loss-of-function polypeptide, or the complement thereof, wherein the nucleotide sequence comprises an adenine at a position corresponding to position 432 according to SEQ ID NO:70, or the complement thereof. In some embodiments, the isolated cDNA molecule comprises or consists of a nucleotide sequence encoding a WNT5B polypeptide, wherein the nucleotide sequence comprises a TGA codon at positions corresponding to positions 430-432 according to SEQ ID NO:70.

[0363] The present disclosure also provides isolated cDNA molecules comprising or consisting of a nucleotide sequence encoding a WNT5B predicted loss-of-function polypeptide, or the complement thereof, wherein the nucleotide sequence comprises an adenine at a position corresponding to position 792 according to SEQ ID NO:71, or the complement thereof. In some embodiments, the isolated cDNA molecule comprises or consists of a nucleotide sequence encoding a WNT5B polypeptide, wherein the nucleotide sequence comprises a TGA codon at positions corresponding to positions 790-792 according to SEQ ID NO:71.

[0364] The present disclosure also provides isolated cDNA molecules comprising or consisting of a nucleotide sequence encoding a WNT5B predicted loss-of-function polypeptide, or the complement thereof, wherein the nucleotide sequence comprises an adenine at a position corresponding to position 254 according to SEQ ID NO:72, or the complement thereof. In some embodiments, the isolated cDNA molecule comprises or consists of a nucleotide sequence encoding a WNT5B polypeptide, wherein the nucleotide sequence comprises a TGA codon at positions corresponding to positions 252-254 according to SEQ ID NO:72.

[0365] The present disclosure also provides isolated cDNA molecules comprising or consisting of a nucleotide sequence encoding a WNT5B predicted loss-of-function polypeptide, or the complement thereof, wherein the nucleotide sequence comprises a deletion of a TC dinucleotide at positions corresponding to positions 1,039-1,040 according to SEQ ID NO:87, or the complement thereof.

[0366] The present disclosure also provides isolated cDNA molecules comprising or consisting of a nucleotide sequence encoding a WNT5B predicted loss-of-function polypeptide, or the complement thereof, wherein the nucleotide sequence comprises a deletion of a TC dinucleotide at positions corresponding to positions 942-943 according to SEQ ID NO:88, or the complement thereof.

[0367] The present disclosure also provides isolated cDNA molecules comprising or consisting of a nucleotide sequence encoding a WNT5B predicted loss-of-function polypeptide, or the complement thereof, wherein the nucleotide sequence comprises a deletion of a TC dinucleotide at positions corresponding to positions 995-996 according to SEQ ID NO:89, or the complement thereof.

[0368] The present disclosure also provides isolated cDNA molecules comprising or consisting of a nucleotide sequence encoding a WNT5B predicted loss-of-function polypeptide, or the complement thereof, wherein the nucleotide sequence comprises a deletion of a TC dinucleotide at positions corresponding to positions 942-943 according to SEQ ID NO:90, or the complement thereof.

[0369] The present disclosure also provides isolated cDNA molecules comprising or consisting of a nucleotide sequence encoding a WNT5B predicted loss-of-function polypeptide, or the complement thereof, wherein the nucleotide sequence comprises a deletion of a TC dinucleotide at positions corresponding to positions 980-981 according to SEQ ID NO:91, or the complement thereof.

[0370] The present disclosure also provides isolated cDNA molecules comprising or consisting of a nucleotide sequence encoding a WNT5B predicted loss-of-function polypeptide, or the complement thereof, wherein the nucleotide sequence comprises a deletion of a TC dinucleotide at positions corresponding to positions 802-803 according to SEQ ID NO:92, or the complement thereof.

[0371] In some embodiments, the isolated cDNA molecules comprise or consist of a nucleotide sequence that has at least about 90%, at least about 91%, at least about 92%, at least about 93%, at least about 94%, at least about 95%, at least about 96%, at least about 97%, at least about 98%, or at least about 99% sequence identity to SEQ ID NO:65, and comprises an adenine at a position corresponding to position 491 according to SEQ ID NO:65, or the complement thereof. In some embodiments, the isolated cDNA molecules comprise or consist of a nucleotide sequence that has at least about 90% sequence identity to SEQ ID NO:65, and comprises an adenine at a position corresponding to position 491 according to SEQ ID NO:65, or the complement thereof. In some embodiments, the isolated cDNA molecules comprise or consist of a nucleotide sequence that has at least about 92% sequence identity to SEQ ID NO:65, and comprises an adenine at a position corresponding to position 491 according to SEQ ID NO:65, or the complement thereof. In some embodiments, the isolated cDNA molecules comprise or consist of a nucleotide sequence that has at least about 94% sequence identity to SEQ ID NO:65, and comprises an adenine at a position corresponding to position 491 according to SEQ ID NO:65, or the complement thereof. In some embodiments, the isolated cDNA molecules comprise or consist of a nucleotide sequence that has at least about 96% sequence identity to SEQ ID NO:65, and comprises an adenine at a position corresponding to position 491 according to SEQ ID NO:65, or the complement thereof. In some embodiments, the isolated cDNA molecules comprise or consist of a nucleotide sequence that has at least about 98% sequence identity to SEQ ID NO:65, and comprises an adenine at a position corresponding to position 491 according to SEQ ID NO:65, or the complement thereof.

[0372] In some embodiments, the isolated cDNA molecules comprise or consist of a nucleotide sequence that has at least about 90%, at least about 91%, at least about 92%, at least about 93%, at least about 94%, at least about 95%, at least about 96%, at least about 97%, at least about 98%, or at least about 99% sequence identity to SEQ ID NO:66, and comprises an adenine at a position corresponding to position 394 according to SEQ ID NO:66, or the complement thereof. In some embodiments, the isolated cDNA molecules comprise or consist of a nucleotide sequence that has at least about 90% sequence identity to SEQ ID NO:66, and comprises an adenine at a position corresponding to position 394 according to SEQ ID NO:66, or the complement thereof. In some embodiments, the isolated cDNA molecules comprise or consist of a nucleotide sequence that has at least about 92% sequence identity to SEQ ID NO:66, and comprises an adenine at a position corresponding to position 394 according to SEQ ID NO:66, or the complement thereof. In some embodiments, the isolated cDNA molecules comprise or consist of a nucleotide sequence that has at least about 94% sequence identity to SEQ ID NO:66, and comprises an adenine at a position corresponding to position 394 according to SEQ ID NO:66, or the complement thereof. In some embodiments, the isolated cDNA molecules comprise or consist of a nucleotide sequence that has at least about 96% sequence identity to SEQ ID NO:66, and comprises an adenine at a position corresponding to position 394 according to SEQ ID NO:66, or the complement thereof. In some embodiments, the isolated cDNA molecules comprise or consist of a nucleotide sequence that has at least about 98% sequence identity to SEQ ID NO:66, and comprises an adenine at a position corresponding to position 394 according to SEQ ID NO:66, or the complement thereof.

[0373] In some embodiments, the isolated cDNA molecules comprise or consist of a nucleotide sequence that has at least about 90%, at least about 91%, at least about 92%, at least about 93%, at least about 94%, at least about 95%, at least about 96%, at least about 97%, at least about 98%, or at least about 99% sequence identity to SEQ ID NO:67, and comprises an adenine at a position corresponding to position 447 according to SEQ ID NO:67, or the complement thereof. In some embodiments, the isolated cDNA molecules comprise or consist of a nucleotide sequence that has at least about 90% sequence identity to SEQ ID NO:67, and comprises an adenine at a position corresponding to position 447 according to SEQ ID NO:67, or the complement thereof. In some embodiments, the isolated cDNA molecules comprise or consist of a nucleotide sequence that has at least about 92% sequence identity to SEQ ID NO:67, and comprises an adenine at a position corresponding to position 447 according to SEQ ID NO:67, or the complement thereof. In some embodiments, the isolated cDNA molecules comprise or consist of a nucleotide sequence that has at least about 94% sequence identity to SEQ ID NO:67, and comprises an adenine at a position corresponding to position 447 according to SEQ ID NO:67, or the complement thereof. In some embodiments, the isolated cDNA molecules comprise or consist of a nucleotide sequence that has at least about 96% sequence identity to SEQ ID NO:67, and comprises an adenine at a position corresponding to position 447 according to SEQ ID NO:67, or the complement thereof. In some embodiments, the isolated cDNA molecules comprise or consist of a nucleotide sequence that has at least about 98% sequence identity to SEQ ID NO:67, and comprises an adenine at a position corresponding to position 447 according to SEQ ID NO:67, or the complement thereof.

[0374] In some embodiments, the isolated cDNA molecules comprise or consist of a nucleotide sequence that has at least about 90%, at least about 91%, at least about 92%, at least about 93%, at least about 94%, at least about 95%, at least about 96%, at least about 97%, at least about 98%, or at least about 99% sequence identity to SEQ ID NO:68, and comprises an adenine at a position corresponding to position 289 according to SEQ ID NO:68, or the complement thereof. In some embodiments, the isolated cDNA molecules comprise or consist of a nucleotide sequence that has at least about 90% sequence identity to SEQ ID NO:68, and comprises an adenine at a position corresponding to position 289 according to SEQ ID NO:68, or the complement thereof. In some embodiments, the isolated cDNA molecules comprise or consist of a nucleotide sequence that has at least about 92% sequence identity to SEQ ID NO:68, and comprises an adenine at a position corresponding to position 289 according to SEQ ID NO:68, or the complement thereof. In some embodiments, the isolated cDNA molecules comprise or consist of a nucleotide sequence that has at least about 94% sequence identity to SEQ ID NO:68, and comprises an adenine at a position corresponding to position 289 according to SEQ ID NO:68, or the complement thereof. In some embodiments, the isolated cDNA molecules comprise or consist of a nucleotide sequence that has at least about 96% sequence identity to SEQ ID NO:68, and comprises an adenine at a position corresponding to position 289 according to SEQ ID NO:68, or the complement thereof. In some embodiments, the isolated cDNA molecules comprise or consist of a nucleotide sequence that has at least about 98% sequence identity to SEQ ID NO:68, and comprises an adenine at a position corresponding to position 289 according to SEQ ID NO:68, or the complement thereof.

[0375] In some embodiments, the isolated cDNA molecules comprise or consist of a nucleotide sequence that has at least about 90%, at least about 91%, at least about 92%, at least about 93%, at least about 94%, at least about 95%, at least about 96%, at least about 97%, at least about 98%, or at least about 99% sequence identity to SEQ ID NO:69, and comprises an adenine at a position corresponding to position 394 according to SEQ ID NO:69, or the complement thereof. In some embodiments, the isolated cDNA molecules comprise or consist of a nucleotide sequence that has at least about 90% sequence identity to SEQ ID NO:69, and comprises an adenine at a position corresponding to position 394 according to SEQ ID NO:69, or the complement thereof. In some embodiments, the isolated cDNA molecules comprise or consist of a nucleotide sequence that has at least about 92% sequence identity to SEQ ID NO:69, and comprises an adenine at a position corresponding to position 394 according to SEQ ID NO:69, or the complement thereof. In some embodiments, the isolated cDNA molecules comprise or consist of a nucleotide sequence that has at least about 94% sequence identity to SEQ ID NO:69, and comprises an adenine at a position corresponding to position 394 according to SEQ ID NO:69, or the complement thereof. In some embodiments, the isolated cDNA molecules comprise or consist of a nucleotide sequence that has at least about 96% sequence identity to SEQ ID NO:69, and comprises an adenine at a position corresponding to position 394 according to SEQ ID NO:69, or the complement thereof. In some embodiments, the isolated cDNA molecules comprise or consist of a nucleotide sequence that has at least about 98% sequence identity to SEQ ID NO:69, and comprises an adenine at a position corresponding to position 394 according to SEQ ID NO:69, or the complement thereof.

[0376] In some embodiments, the isolated cDNA molecules comprise or consist of a nucleotide sequence that has at least about 90%, at least about 91%, at least about 92%, at least about 93%, at least about 94%, at least about 95%, at least about 96%, at least about 97%, at least about 98%, or at least about 99% sequence identity to SEQ ID NO:70, and comprises an adenine at a position corresponding to position 432 according to SEQ ID NO:70, or the complement thereof. In some embodiments, the isolated cDNA molecules comprise or consist of a nucleotide sequence that has at least about 90% sequence identity to SEQ ID NO:70, and comprises an adenine at a position corresponding to position 432 according to SEQ ID NO:70, or the complement thereof. In some embodiments, the isolated cDNA molecules comprise or consist of a nucleotide sequence that has at least about 92% sequence identity to SEQ ID NO:70, and comprises an adenine at a position corresponding to position 432 according to SEQ ID NO:70, or the complement thereof. In some embodiments, the isolated cDNA molecules comprise or consist of a nucleotide sequence that has at least about 94% sequence identity to SEQ ID NO:70, and comprises an adenine at a position corresponding to position 432 according to SEQ ID NO:70, or the complement thereof. In some embodiments, the isolated cDNA molecules comprise or consist of a nucleotide sequence that has at least about 96% sequence identity to SEQ ID NO:70, and comprises an adenine at a position corresponding to position 432 according to SEQ ID NO:70, or the complement thereof. In some embodiments, the isolated cDNA molecules comprise or consist of a nucleotide sequence that has at least about 98% sequence identity to SEQ ID NO:70, and comprises an adenine at a position corresponding to position 432 according to SEQ ID NO:70, or the complement thereof.

[0377] In some embodiments, the isolated cDNA molecules comprise or consist of a nucleotide sequence that has at least about 90%, at least about 91%, at least about 92%, at least about 93%, at least about 94%, at least about 95%, at least about 96%, at least about 97%, at least about 98%, or at least about 99% sequence identity to SEQ ID NO:71, and comprises an adenine at a position corresponding to position 792 according to SEQ ID NO:71, or the complement thereof. In some embodiments, the isolated cDNA molecules comprise or consist of a nucleotide sequence that has at least about 90% sequence identity to SEQ ID NO:71, and comprises an adenine at a position corresponding to position 792 according to SEQ ID NO:71, or the complement thereof. In some embodiments, the isolated cDNA molecules comprise or consist of a nucleotide sequence that has at least about 92% sequence identity to SEQ ID NO:71, and comprises an adenine at a position corresponding to position 792 according to SEQ ID NO:71, or the complement thereof. In some embodiments, the isolated cDNA molecules comprise or consist of a nucleotide sequence that has at least about 94% sequence identity to SEQ ID NO:71, and comprises an adenine at a position corresponding to position 792 according to SEQ ID NO:71, or the complement thereof. In some embodiments, the isolated cDNA molecules comprise or consist of a nucleotide sequence that has at least about 96% sequence identity to SEQ ID NO:71, and comprises an adenine at a position corresponding to position 792 according to SEQ ID NO:71, or the complement thereof. In some embodiments, the isolated cDNA molecules comprise or consist of a nucleotide sequence that has at least about 98% sequence identity to SEQ ID NO:71, and comprises an adenine at a position corresponding to position 792 according to SEQ ID NO:71, or the complement thereof.

[0378] In some embodiments, the isolated cDNA molecules comprise or consist of a nucleotide sequence that has at least about 90%, at least about 91%, at least about 92%, at least about 93%, at least about 94%, at least about 95%, at least about 96%, at least about 97%, at least about 98%, or at least about 99% sequence identity to SEQ ID NO:72, and comprises an adenine at a position corresponding to position 254 according to SEQ ID NO:72, or the complement thereof. In some embodiments, the isolated cDNA molecules comprise or consist of a nucleotide sequence that has at least about 90% sequence identity to SEQ ID NO:72, and comprises an adenine at a position corresponding to position 254 according to SEQ ID NO:72, or the complement thereof. In some embodiments, the isolated cDNA molecules comprise or consist of a nucleotide sequence that has at least about 92% sequence identity to SEQ ID NO:72, and comprises an adenine at a position corresponding to position 254 according to SEQ ID NO:72, or the complement thereof. In some embodiments, the isolated cDNA molecules comprise or consist of a nucleotide sequence that has at least about 94% sequence identity to SEQ ID NO:72, and comprises an adenine at a position corresponding to position 254 according to SEQ ID NO:72, or the complement thereof. In some embodiments, the isolated cDNA molecules comprise or consist of a nucleotide sequence that has at least about 96% sequence identity to SEQ ID NO:72, and comprises an adenine at a position corresponding to position 254 according to SEQ ID NO:72, or the complement thereof. In some embodiments, the isolated cDNA molecules comprise or consist of a nucleotide sequence that has at least about 98% sequence identity to SEQ ID NO:72, and comprises an adenine at a position corresponding to position 254 according to SEQ ID NO:72, or the complement thereof.

[0379] In some embodiments, the isolated cDNA molecules comprise or consist of a nucleotide sequence that has at least about 90%, at least about 91%, at least about 92%, at least about 93%, at least about 94%, at least about 95%, at least about 96%, at least about 97%, at least about 98%, or at least about 99% sequence identity to SEQ ID NO:87, and comprises a deletion of a TC dinucleotide at positions corresponding to positions 1,039-1,040 according to SEQ ID NO:87, or the complement thereof. In some embodiments, the isolated cDNA molecules comprise or consist of a nucleotide sequence that has at least about 90% sequence identity to SEQ ID NO:87, and comprises a deletion of a TC dinucleotide at positions corresponding to positions 1,039-1,040 according to SEQ ID NO:87, or the complement thereof. In some embodiments, the isolated cDNA molecules comprise or consist of a nucleotide sequence that has at least about 92% sequence identity to SEQ ID NO:87, and comprises a deletion of a TC dinucleotide at positions corresponding to positions 1,039-1,040 according to SEQ ID NO:87, or the complement thereof. In some embodiments, the isolated cDNA molecules comprise or consist of a nucleotide sequence that has at least about 94% sequence identity to SEQ ID NO:87, and comprises a deletion of a TC dinucleotide at positions corresponding to positions 1,039-1,040 according to SEQ ID NO:87, or the complement thereof. In some embodiments, the isolated cDNA molecules comprise or consist of a nucleotide sequence that has at least about 96% sequence identity to SEQ ID NO:87, and comprises a deletion of a TC dinucleotide at positions corresponding to positions 1,039-1,040 according to SEQ ID NO:87, or the complement thereof. In some embodiments, the isolated cDNA molecules comprise or consist of a nucleotide sequence that has at least about 98% sequence identity to SEQ ID NO:87, and comprises a deletion of a TC dinucleotide at positions corresponding to positions 1,039-1,040 according to SEQ ID NO:87, or the complement thereof.

[0380] In some embodiments, the isolated cDNA molecules comprise or consist of a nucleotide sequence that has at least about 90%, at least about 91%, at least about 92%, at least about 93%, at least about 94%, at least about 95%, at least about 96%, at least about 97%, at least about 98%, or at least about 99% sequence identity to SEQ ID NO:88, and comprises a deletion of a TC dinucleotide at positions corresponding to positions 942-943 according to SEQ ID NO:88, or the complement thereof. In some embodiments, the isolated cDNA molecules comprise or consist of a nucleotide sequence that has at least about 90% sequence identity to SEQ ID NO:88, and comprises a deletion of a TC dinucleotide at positions corresponding to positions 942-943 according to SEQ ID NO:88, or the complement thereof. In some embodiments, the isolated cDNA molecules comprise or consist of a nucleotide sequence that has at least about 92% sequence identity to SEQ ID NO:88, and comprises a deletion of a TC dinucleotide at positions corresponding to positions 942-943 according to SEQ ID NO:88, or the complement thereof. In some embodiments, the isolated cDNA molecules comprise or consist of a nucleotide sequence that has at least about 94% sequence identity to SEQ ID NO:88, and comprises a deletion of a TC dinucleotide at positions corresponding to positions 942-943 according to SEQ ID NO:88, or the complement thereof. In some embodiments, the isolated cDNA molecules comprise or consist of a nucleotide sequence that has at least about 96% sequence identity to SEQ ID NO:88, and comprises a deletion of a TC dinucleotide at positions corresponding to positions 942-943 according to SEQ ID NO:88, or the complement thereof. In some embodiments, the isolated cDNA molecules comprise or consist of a nucleotide sequence that has at least about 98% sequence identity to SEQ ID NO:88, and comprises a deletion of a TC dinucleotide at positions corresponding to positions 942-943 according to SEQ ID NO:88, or the complement thereof.

[0381] In some embodiments, the isolated cDNA molecules comprise or consist of a nucleotide sequence that has at least about 90%, at least about 91%, at least about 92%, at least about 93%, at least about 94%, at least about 95%, at least about 96%, at least about 97%, at least about 98%, or at least about 99% sequence identity to SEQ ID NO:89, and comprises a deletion of a TC dinucleotide at positions corresponding to positions 995-996 according to SEQ ID NO:89, or the complement thereof. In some embodiments, the isolated cDNA molecules comprise or consist of a nucleotide sequence that has at least about 90% sequence identity to SEQ ID NO:89, and comprises a deletion of a TC dinucleotide at positions corresponding to positions 995-996 according to SEQ ID NO:89, or the complement thereof. In some embodiments, the isolated cDNA molecules comprise or consist of a nucleotide sequence that has at least about 92% sequence identity to SEQ ID NO:89, and comprises a deletion of a TC dinucleotide at positions corresponding to positions 995-996 according to SEQ ID NO:89, or the complement thereof. In some embodiments, the isolated cDNA molecules comprise or consist of a nucleotide sequence that has at least about 94% sequence identity to SEQ ID NO:89, and comprises a deletion of a TC dinucleotide at positions corresponding to positions 995-996 according to SEQ ID NO:89, or the complement thereof. In some embodiments, the isolated cDNA molecules comprise or consist of a nucleotide sequence that has at least about 96% sequence identity to SEQ ID NO:89, and comprises a deletion of a TC dinucleotide at positions corresponding to positions 995-996 according to SEQ ID NO:89, or the complement thereof. In some embodiments, the isolated cDNA molecules comprise or consist of a nucleotide sequence that has at least about 98% sequence identity to SEQ ID NO:89, and comprises a deletion of a TC dinucleotide at positions corresponding to positions 995-996 according to SEQ ID NO:89, or the complement thereof.

[0382] In some embodiments, the isolated cDNA molecules comprise or consist of a nucleotide sequence that has at least about 90%, at least about 91%, at least about 92%, at least about 93%, at least about 94%, at least about 95%, at least about 96%, at least about 97%, at least about 98%, or at least about 99% sequence identity to SEQ ID NO:90, and comprises a deletion of a TC dinucleotide at positions corresponding to positions 942-943 according to SEQ ID NO:90, or the complement thereof. In some embodiments, the isolated cDNA molecules comprise or consist of a nucleotide sequence that has at least about 90% sequence identity to SEQ ID NO:90, and comprises a deletion of a TC dinucleotide at positions corresponding to positions 942-943 according to SEQ ID NO:90, or the complement thereof. In some embodiments, the isolated cDNA molecules comprise or consist of a nucleotide sequence that has at least about 92% sequence identity to SEQ ID NO:90, and comprises a deletion of a TC dinucleotide at positions corresponding to positions 942-943 according to SEQ ID NO:90, or the complement thereof. In some embodiments, the isolated cDNA molecules comprise or consist of a nucleotide sequence that has at least about 94% sequence identity to SEQ ID NO:90, and comprises a deletion of a TC dinucleotide at positions corresponding to positions 942-943 according to SEQ ID NO:90, or the complement thereof. In some embodiments, the isolated cDNA molecules comprise or consist of a nucleotide sequence that has at least about 96% sequence identity to SEQ ID NO:90, and comprises a deletion of a TC dinucleotide at positions corresponding to positions 942-943 according to SEQ ID NO:90, or the complement thereof. In some embodiments, the isolated cDNA molecules comprise or consist of a nucleotide sequence that has at least about 98% sequence identity to SEQ ID NO:90, and comprises a deletion of a TC dinucleotide at positions corresponding to positions 942-943 according to SEQ ID NO:90, or the complement thereof.

[0383] In some embodiments, the isolated cDNA molecules comprise or consist of a nucleotide sequence that has at least about 90%, at least about 91%, at least about 92%, at least about 93%, at least about 94%, at least about 95%, at least about 96%, at least about 97%, at least about 98%, or at least about 99% sequence identity to SEQ ID NO:91, and comprises a deletion of a TC dinucleotide at positions corresponding to positions 980-981 according to SEQ ID NO:91, or the complement thereof. In some embodiments, the isolated cDNA molecules comprise or consist of a nucleotide sequence that has at least about 90% sequence identity to SEQ ID NO:91, and comprises a deletion of a TC dinucleotide at positions corresponding to positions 980-981 according to SEQ ID NO:91, or the complement thereof. In some embodiments, the isolated cDNA molecules comprise or consist of a nucleotide sequence that has at least about 92% sequence identity to SEQ ID NO:91, and comprises a deletion of a TC dinucleotide at positions corresponding to positions 980-981 according to SEQ ID NO:91, or the complement thereof. In some embodiments, the isolated cDNA molecules comprise or consist of a nucleotide sequence that has at least about 94% sequence identity to SEQ ID NO:91, and comprises a deletion of a TC dinucleotide at positions corresponding to positions 980-981 according to SEQ ID NO:91, or the complement thereof. In some embodiments, the isolated cDNA molecules comprise or consist of a nucleotide sequence that has at least about 96% sequence identity to SEQ ID NO:91, and comprises a deletion of a TC dinucleotide at positions corresponding to positions 980-981 according to SEQ ID NO:91, or the complement thereof. In some embodiments, the isolated cDNA molecules comprise or consist of a nucleotide sequence that has at least about 98% sequence identity to SEQ ID NO:91, and comprises a deletion of a TC dinucleotide at positions corresponding to positions 980-981 according to SEQ ID NO:91, or the complement thereof.

[0384] In some embodiments, the isolated cDNA molecules comprise or consist of a nucleotide sequence that has at least about 90%, at least about 91%, at least about 92%, at least about 93%, at least about 94%, at least about 95%, at least about 96%, at least about 97%, at least about 98%, or at least about 99% sequence identity to SEQ ID NO:92, and comprises a deletion of a TC dinucleotide at positions corresponding to positions 802-803 according to SEQ ID NO:92, or the complement thereof. In some embodiments, the isolated cDNA molecules comprise or consist of a nucleotide sequence that has at least about 90% sequence identity to SEQ ID NO:92, and comprises a deletion of a TC dinucleotide at positions corresponding to positions 802-803 according to SEQ ID NO:92, or the complement thereof. In some embodiments, the isolated cDNA molecules comprise or consist of a nucleotide sequence that has at least about 92% sequence identity to SEQ ID NO:92, and comprises a deletion of a TC dinucleotide at positions corresponding to positions 802-803 according to SEQ ID NO:92, or the complement thereof. In some embodiments, the isolated cDNA molecules comprise or consist of a nucleotide sequence that has at least about 94% sequence identity to SEQ ID NO:92, and comprises a deletion of a TC dinucleotide at positions corresponding to positions 802-803 according to SEQ ID NO:92, or the complement thereof. In some embodiments, the isolated cDNA molecules comprise or consist of a nucleotide sequence that has at least about 96% sequence identity to SEQ ID NO:92, and comprises a deletion of a TC dinucleotide at positions corresponding to positions 802-803 according to SEQ ID NO:92, or the complement thereof. In some embodiments, the isolated cDNA molecules comprise or consist of a nucleotide sequence that has at least about 98% sequence identity to SEQ ID NO:92, and comprises a deletion of a TC dinucleotide at positions corresponding to positions 802-803 according to SEQ ID NO:92, or the complement thereof.

[0385] Herein, if reference is made to percent sequence identity, the higher percentages of sequence identity are preferred over the lower ones.

[0386] In some embodiments, the isolated cDNA molecules comprise or consist of a nucleotide sequence that has at least about 90%, at least about 91%, at least about 92%, at least about 93%, at least about 94%, at least about 95%, at least about 96%, at least about 97%, at least about 98%, or at least about 99% sequence identity to SEQ ID NO:65, and comprises a TGA codon at positions corresponding to positions 489-491 according to SEQ ID NO:65, or the complement thereof. In some embodiments, the isolated cDNA molecules comprise or consist of a nucleotide sequence that has at least about 90% sequence identity to SEQ ID NO:65, and comprises a TGA codon at positions corresponding to positions 489-491 according to SEQ ID NO:65, or the complement thereof. In some embodiments, the isolated cDNA molecules comprise or consist of a nucleotide sequence that has at least about 92% sequence identity to SEQ ID NO:65, and comprises a TGA codon at positions corresponding to positions 489-491 according to SEQ ID NO:65, or the complement thereof. In some embodiments, the isolated cDNA molecules comprise or consist of a nucleotide sequence that has at least about 94% sequence identity to SEQ ID NO:65, and comprises a TGA codon at positions corresponding to positions 489-491 according to SEQ ID NO:65, or the complement thereof. In some embodiments, the isolated cDNA molecules comprise or consist of a nucleotide sequence that has at least about 96% sequence identity to SEQ ID NO:65, and comprises a TGA codon at positions corresponding to positions 489-491 according to SEQ ID NO:65, or the complement thereof. In some embodiments, the isolated cDNA molecules comprise or consist of a nucleotide sequence that has at least about 98% sequence identity to SEQ ID NO:65, and comprises a TGA codon at positions corresponding to positions 489-491 according to SEQ ID NO:65, or the complement thereof.

[0387] In some embodiments, the isolated cDNA molecules comprise or consist of a nucleotide sequence that has at least about 90%, at least about 91%, at least about 92%, at least about 93%, at least about 94%, at least about 95%, at least about 96%, at least about 97%, at least about 98%, or at least about 99% sequence identity to SEQ ID NO:66, and comprises a TGA codon at positions corresponding to positions 392-394 according to SEQ ID NO:66, or the complement thereof. In some embodiments, the isolated cDNA molecules comprise or consist of a nucleotide sequence that has at least about 90% sequence identity to SEQ ID NO:66, and comprises a TGA codon at positions corresponding to positions 392-394 according to SEQ ID NO:66, or the complement thereof. In some embodiments, the isolated cDNA molecules comprise or consist of a nucleotide sequence that has at least about 92% sequence identity to SEQ ID NO:66, and comprises a TGA codon at positions corresponding to positions 392-394 according to SEQ ID NO:66, or the complement thereof. In some embodiments, the isolated cDNA molecules comprise or consist of a nucleotide sequence that has at least about 94% sequence identity to SEQ ID NO:66, and comprises a TGA codon at positions corresponding to positions 392-394 according to SEQ ID NO:66, or the complement thereof. In some embodiments, the isolated cDNA molecules comprise or consist of a nucleotide sequence that has at least about 96% sequence identity to SEQ ID NO:66, and comprises a TGA codon at positions corresponding to positions 392-394 according to SEQ ID NO:66, or the complement thereof. In some embodiments, the isolated cDNA molecules comprise or consist of a nucleotide sequence that has at least about 98% sequence identity to SEQ ID NO:66, and comprises a TGA codon at positions corresponding to positions 392-394 according to SEQ ID NO:66, or the complement thereof.

[0388] In some embodiments, the isolated cDNA molecules comprise or consist of a nucleotide sequence that has at least about 90%, at least about 91%, at least about 92%, at least about 93%, at least about 94%, at least about 95%, at least about 96%, at least about 97%, at least about 98%, or at least about 99% sequence identity to SEQ ID NO:67, and comprises a TGA codon at positions corresponding to positions 445-447 according to SEQ ID NO:67, or the complement thereof. In some embodiments, the isolated cDNA molecules comprise or consist of a nucleotide sequence that has at least about 90% sequence identity to SEQ ID NO:67, and comprises a TGA codon at positions corresponding to positions 445-447 according to SEQ ID NO:67, or the complement thereof. In some embodiments, the isolated cDNA molecules comprise or consist of a nucleotide sequence that has at least about 92% sequence identity to SEQ ID NO:67, and comprises a TGA codon at positions corresponding to positions 445-447 according to SEQ ID NO:67, or the complement thereof. In some embodiments, the isolated cDNA molecules comprise or consist of a nucleotide sequence that has at least about 94% sequence identity to SEQ ID NO:67, and comprises a TGA codon at positions corresponding to positions 445-447 according to SEQ ID NO:67, or the complement thereof. In some embodiments, the isolated cDNA molecules comprise or consist of a nucleotide sequence that has at least about 96% sequence identity to SEQ ID NO:67, and comprises a TGA codon at positions corresponding to positions 445-447 according to SEQ ID NO:67, or the complement thereof. In some embodiments, the isolated cDNA molecules comprise or consist of a nucleotide sequence that has at least about 98% sequence identity to SEQ ID NO:67, and comprises a TGA codon at positions corresponding to positions 445-447 according to SEQ ID NO:67, or the complement thereof.

[0389] In some embodiments, the isolated cDNA molecules comprise or consist of a nucleotide sequence that has at least about 90%, at least about 91%, at least about 92%, at least about 93%, at least about 94%, at least about 95%, at least about 96%, at least about 97%, at least about 98%, or at least about 99% sequence identity to SEQ ID NO:68, and comprises a TGA codon at positions corresponding to positions 287-289 according to SEQ ID NO:68, or the complement thereof. In some embodiments, the isolated cDNA molecules comprise or consist of a nucleotide sequence that has at least about 90% sequence identity to SEQ ID NO:68, and comprises a TGA codon at positions corresponding to positions 287-289 according to SEQ ID NO:68, or the complement thereof. In some embodiments, the isolated cDNA molecules comprise or consist of a nucleotide sequence that has at least about 92% sequence identity to SEQ ID NO:68, and comprises a TGA codon at positions corresponding to positions 287-289 according to SEQ ID NO:68, or the complement thereof. In some embodiments, the isolated cDNA molecules comprise or consist of a nucleotide sequence that has at least about 94% sequence identity to SEQ ID NO:68, and comprises a TGA codon at positions corresponding to positions 287-289 according to SEQ ID NO:68, or the complement thereof. In some embodiments, the isolated cDNA molecules comprise or consist of a nucleotide sequence that has at least about 96% sequence identity to SEQ ID NO:68, and comprises a TGA codon at positions corresponding to positions 287-289 according to SEQ ID NO:68, or the complement thereof. In some embodiments, the isolated cDNA molecules comprise or consist of a nucleotide sequence that has at least about 98% sequence identity to SEQ ID NO:68, and comprises a TGA codon at positions corresponding to positions 287-289 according to SEQ ID NO:68, or the complement thereof.

[0390] In some embodiments, the isolated cDNA molecules comprise or consist of a nucleotide sequence that has at least about 90%, at least about 91%, at least about 92%, at least about 93%, at least about 94%, at least about 95%, at least about 96%, at least about 97%, at least about 98%, or at least about 99% sequence identity to SEQ ID NO:69, and comprises a TGA codon at positions corresponding to positions 392-394 according to SEQ ID NO:69, or the complement thereof. In some embodiments, the isolated cDNA molecules comprise or consist of a nucleotide sequence that has at least about 90% sequence identity to SEQ ID NO:69, and comprises a TGA codon at positions corresponding to positions 392-394 according to SEQ ID NO:69, or the complement thereof. In some embodiments, the isolated cDNA molecules comprise or consist of a nucleotide sequence that has at least about 92% sequence identity to SEQ ID NO:69, and comprises a TGA codon at positions corresponding to positions 392-394 according to SEQ ID NO:69, or the complement thereof. In some embodiments, the isolated cDNA molecules comprise or consist of a nucleotide sequence that has at least about 94% sequence identity to SEQ ID NO:69, and comprises a TGA codon at positions corresponding to positions 392-394 according to SEQ ID NO:69, or the complement thereof. In some embodiments, the isolated cDNA molecules comprise or consist of a nucleotide sequence that has at least about 96% sequence identity to SEQ ID NO:69, and comprises a TGA codon at positions corresponding to positions 392-394 according to SEQ ID NO:69, or the complement thereof. In some embodiments, the isolated cDNA molecules comprise or consist of a nucleotide sequence that has at least about 98% sequence identity to SEQ ID NO:69, and comprises a TGA codon at positions corresponding to positions 392-394 according to SEQ ID NO:69, or the complement thereof.

[0391] In some embodiments, the isolated cDNA molecules comprise or consist of a nucleotide sequence that has at least about 90%, at least about 91%, at least about 92%, at least about 93%, at least about 94%, at least about 95%, at least about 96%, at least about 97%, at least about 98%, or at least about 99% sequence identity to SEQ ID NO:70, and comprises a TGA codon at positions corresponding to positions 430-432 according to SEQ ID NO:70, or the complement thereof. In some embodiments, the isolated cDNA molecules comprise or consist of a nucleotide sequence that has at least about 90% sequence identity to SEQ ID NO:70, and comprises a TGA codon at positions corresponding to positions 430-432 according to SEQ ID NO:70, or the complement thereof. In some embodiments, the isolated cDNA molecules comprise or consist of a nucleotide sequence that has at least about 92% sequence identity to SEQ ID NO:70, and comprises a TGA codon at positions corresponding to positions 430-432 according to SEQ ID NO:70, or the complement thereof. In some embodiments, the isolated cDNA molecules comprise or consist of a nucleotide sequence that has at least about 94% sequence identity to SEQ ID NO:70, and comprises a TGA codon at positions corresponding to positions 430-432 according to SEQ ID NO:70, or the complement thereof. In some embodiments, the isolated cDNA molecules comprise or consist of a nucleotide sequence that has at least about 96% sequence identity to SEQ ID NO:70, and comprises a TGA codon at positions corresponding to positions 430-432 according to SEQ ID NO:70, or the complement thereof. In some embodiments, the isolated cDNA molecules comprise or consist of a nucleotide sequence that has at least about 98% sequence identity to SEQ ID NO:70, and comprises a TGA codon at positions corresponding to positions 430-432 according to SEQ ID NO:70, or the complement thereof.

[0392] In some embodiments, the isolated cDNA molecules comprise or consist of a nucleotide sequence that has at least about 90%, at least about 91%, at least about 92%, at least about 93%, at least about 94%, at least about 95%, at least about 96%, at least about 97%, at least about 98%, or at least about 99% sequence identity to SEQ ID NO:71, and comprises a TGA codon at positions corresponding to positions 790-792 according to SEQ ID NO:71, or the complement thereof. In some embodiments, the isolated cDNA molecules comprise or consist of a nucleotide sequence that has at least about 90% sequence identity to SEQ ID NO:71, and comprises a TGA codon at positions corresponding to positions 790-792 according to SEQ ID NO:71, or the complement thereof. In some embodiments, the isolated cDNA molecules comprise or consist of a nucleotide sequence that has at least about 92% sequence identity to SEQ ID NO:71, and comprises a TGA codon at positions corresponding to positions 790-792 according to SEQ ID NO:71, or the complement thereof. In some embodiments, the isolated cDNA molecules comprise or consist of a nucleotide sequence that has at least about 94% sequence identity to SEQ ID NO:71, and comprises a TGA codon at positions corresponding to positions 790-792 according to SEQ ID NO:71, or the complement thereof. In some embodiments, the isolated cDNA molecules comprise or consist of a nucleotide sequence that has at least about 96% sequence identity to SEQ ID NO:71, and comprises a TGA codon at positions corresponding to positions 790-792 according to SEQ ID NO:71, or the complement thereof. In some embodiments, the isolated cDNA molecules comprise or consist of a nucleotide sequence that has at least about 98% sequence identity to SEQ ID NO:71, and comprises a TGA codon at positions corresponding to positions 790-792 according to SEQ ID NO:71, or the complement thereof.

[0393] In some embodiments, the isolated cDNA molecules comprise or consist of a nucleotide sequence that has at least about 90%, at least about 91%, at least about 92%, at least about 93%, at least about 94%, at least about 95%, at least about 96%, at least about 97%, at least about 98%, or at least about 99% sequence identity to SEQ ID NO:72, and comprises a TGA codon at positions corresponding to positions 252-254 according to SEQ ID NO:72, or the complement thereof. In some embodiments, the isolated cDNA molecules comprise or consist of a nucleotide sequence that has at least about 90% sequence identity to SEQ ID NO:72, and comprises a TGA codon at positions corresponding to positions 252-254 according to SEQ ID NO:72, or the complement thereof. In some embodiments, the isolated cDNA molecules comprise or consist of a nucleotide sequence that has at least about 92% sequence identity to SEQ ID NO:72, and comprises a TGA codon at positions corresponding to positions 252-254 according to SEQ ID NO:72, or the complement thereof. In some embodiments, the isolated cDNA molecules comprise or consist of a nucleotide sequence that has at least about 94% sequence identity to SEQ ID NO:72, and comprises a TGA codon at positions corresponding to positions 252-254 according to SEQ ID NO:72, or the complement thereof. In some embodiments, the isolated cDNA molecules comprise or consist of a nucleotide sequence that has at least about 96% sequence identity to SEQ ID NO:72, and comprises a TGA codon at positions corresponding to positions 252-254 according to SEQ ID NO:72, or the complement thereof. In some embodiments, the isolated cDNA molecules comprise or consist of a nucleotide sequence that has at least about 98% sequence identity to SEQ ID NO:72, and comprises a TGA codon at positions corresponding to positions 252-254 according to SEQ ID NO:72, or the complement thereof.

[0394] Herein, if reference is made to percent sequence identity, the higher percentages of sequence identity are preferred over the lower ones.

[0395] In some embodiments, the isolated cDNA molecule comprises SEQ ID NO:65. In some embodiments, the isolated cDNA molecule consists of SEQ ID NO:65. In some embodiments, the isolated cDNA molecule comprises SEQ ID NO:66. In some embodiments, the isolated cDNA molecule consists of SEQ ID NO:66. In some embodiments, the isolated cDNA molecule comprises SEQ ID NO:67. In some embodiments, the isolated cDNA molecule consists of SEQ ID NO:67. In some embodiments, the isolated cDNA molecule comprises SEQ ID NO:68. In some embodiments, the isolated cDNA molecule consists of SEQ ID NO:68. In some embodiments, the isolated cDNA molecule comprises SEQ ID NO:69. In some embodiments, the isolated cDNA molecule consists of SEQ ID NO:69. In some embodiments, the isolated cDNA molecule comprises SEQ ID NO:70. In some embodiments, the isolated cDNA molecule consists of SEQ ID NO:70. In some embodiments, the isolated cDNA molecule comprises SEQ ID NO:71. In some embodiments, the isolated cDNA molecule consists of SEQ ID NO:71. In some embodiments, the isolated cDNA molecule comprises SEQ ID NO:72. In some embodiments, the isolated cDNA molecule consists of SEQ ID NO:72.

[0396] In some embodiments, the isolated cDNA molecule comprises SEQ ID NO:87. In some embodiments, the isolated cDNA molecule consists of SEQ ID NO:87. In some embodiments, the isolated cDNA molecule comprises SEQ ID NO:88. In some embodiments, the isolated cDNA molecule consists of SEQ ID NO:88. In some embodiments, the isolated cDNA molecule comprises SEQ ID NO:89. In some embodiments, the isolated cDNA molecule consists of SEQ ID NO:89. In some embodiments, the isolated cDNA molecule comprises SEQ ID NO:90. In some embodiments, the isolated cDNA molecule consists of SEQ ID NO:90. In some embodiments, the isolated cDNA molecule comprises SEQ ID NO:91. In some embodiments, the isolated cDNA molecule consists of SEQ ID NO:91. In some embodiments, the isolated cDNA molecule comprises SEQ ID NO:92.

[0397] In some embodiments, the isolated mRNA molecules or cDNA molecules comprise less than the entire mRNA or cDNA sequence. In some embodiments, the isolated mRNA molecules or cDNA molecules comprise or consist of at least about 5, at least about 8, at least about 10, at least about 12, at least about 15, at least about 20, at least about 25, at least about 30, at least about 35, at least about 40, at least about 45, at least about 50, at least about 60, at least about 70, at least about 80, at least about 90, at least about 100, at least about 200, at least about 300, at least about 400, at least about 500, at least about 600, at least about 700, at least about 800, at least about 900, at least about 1000, at least about 1100, at least about 1200, at least about 1300, at least about 1400, at least about 1500, at least about 1600, at least about 1700, at least about 1800, at least about 1900, or at least about 2000 contiguous nucleotides of any of the WNT5B mRNA molecules or cDNA molecules disclosed herein. In some embodiments, the isolated mRNA molecules or cDNA molecules comprise or consist of at least about 400 to at least about 500 contiguous nucleotides of any of the WNT5B mRNA molecules or cDNA molecules disclosed herein. In some embodiments, the isolated cDNA molecules comprise or consist of at least about 1000 to at least about 2000 contiguous nucleotides of any of the WNT5B mRNA molecules or cDNA molecules disclosed herein. In some embodiments, these isolated mRNA molecules comprise: In some embodiments, these isolated mRNA molecules comprise: an adenine at a position corresponding to position 491 according to SEQ ID NO:22; an adenine at a position corresponding to position 394 according to SEQ ID NO:23; an adenine at a position corresponding to position 447 according to SEQ ID NO:24; an adenine at a position corresponding to position 289 according to SEQ ID NO:25; an adenine at a position corresponding to position 394 according to SEQ ID NO:26; an adenine at a position corresponding to position 432 according to SEQ ID NO:27; an adenine at a position corresponding to position 792 according to SEQ ID NO:28; or an adenine at a position corresponding to position 254 according to SEQ ID NO:29. In some embodiments, these isolated mRNA molecules comprise: a deletion of a UC dinucleotide at positions corresponding to positions 1,039-1,040 according to SEQ ID NO:44; a deletion of a UC dinucleotide at positions corresponding to positions 942-943 according to SEQ ID NO:45; a deletion of a UC dinucleotide at positions corresponding to positions 995-996 according to SEQ ID NO:46; a deletion of a UC dinucleotide at positions corresponding to positions 942-943 according to SEQ ID NO:47; a deletion of a UC dinucleotide at positions corresponding to positions 980-981 according to SEQ ID NO:48; or a deletion of a UC dinucleotide at positions corresponding to positions 802-803 according to SEQ ID NO:49. In some embodiments, these isolated cDNA molecules comprise: an adenine at a position corresponding to position 491 according to SEQ ID NO:65; an adenine at a position corresponding to position 394 according to SEQ ID NO:66; an adenine at a position corresponding to position 447 according to SEQ ID NO:67; an adenine at a position corresponding to position 289 according to SEQ ID NO:68; an adenine at a position corresponding to position 394 according to SEQ ID NO:69; an adenine at a position corresponding to position 432 according to SEQ ID NO:70; an adenine at a position corresponding to position 792 according to SEQ ID NO:71; or an adenine at a position corresponding to position 254 according to SEQ ID NO:72. In some embodiments, these isolated cDNA molecules comprise: a deletion of a TC dinucleotide at positions corresponding to positions 1,039-1,040 according to SEQ ID NO:87; a deletion of a TC dinucleotide at positions corresponding to positions 942-943 according to SEQ ID NO:88; a deletion of a TC dinucleotide at positions corresponding to positions 995-996 according to SEQ ID NO:89; a deletion of a TC dinucleotide at positions corresponding to positions 942-943 according to SEQ ID NO:90; a deletion of a TC dinucleotide at positions corresponding to positions 980-981 according to SEQ ID NO:91; or a deletion of a TC dinucleotide at positions corresponding to positions 802-803 according to SEQ ID NO:92.

[0398] The genomic nucleic acid molecules, mRNA molecules, and cDNA molecules can be from any organism. For example, the genomic nucleic acid molecules, mRNA molecules, and cDNA molecules can be human or an ortholog from another organism, such as a non-human mammal, a rodent, a mouse, or a rat. It is understood that gene sequences within a population can vary due to polymorphisms such as single-nucleotide polymorphisms. The examples provided herein are only exemplary sequences. Other sequences are also possible.

[0399] The present disclosure also provides fragments of any of the isolated genomic nucleic acid molecules, mRNA molecules, or cDNA molecules disclosed herein. In some embodiments, the fragments comprise or consist of at least about 5, at least about 8, at least about 10, at least about 11, at least about 12, at least about 13, at least about 14, at least about 15, at least about 16, at least about 17, at least about 18, at least about 19, at least about 20, at least about 21, at least about 22, at least about 23, at least about 24, at least about 25, at least about 30, at least about 35, at least about 40, at least about 45, at least about 50, at least about 55, at least about 60, at least about 65, at least about 70, at least about 75, at least about 80, at least about 85, at least about 90, at least about 95, or at least about 100 contiguous residues of any of the nucleic acid molecules disclosed herein, or any complement thereof. In some embodiments, the fragments comprise or consist of at least about 20, at least about 25, at least about 30, or at least about 35 contiguous residues of any of the nucleic acid molecules disclosed herein, or any complement thereof. In this regard, the longer fragments are preferred over the shorter ones. Such fragments may be used, for example, as probes, primers, alteration-specific probes, or alteration-specific primers as described or exemplified herein, and include, without limitation primers, probes, antisense RNAs, shRNAs, and siRNAs, each of which is described in more detail elsewhere herein.

[0400] Also provided herein are functional polynucleotides that can interact with the disclosed nucleic acid molecules. Examples of functional polynucleotides include, but are not limited to, antisense molecules, aptamers, ribozymes, triplex forming molecules, and external guide sequences. The functional polynucleotides can act as effectors, inhibitors, modulators, and stimulators of a specific activity possessed by a target molecule, or the functional polynucleotides can possess a de novo activity independent of any other molecules.

[0401] The isolated nucleic acid molecules disclosed herein can comprise RNA, DNA, or both RNA and DNA. The isolated nucleic acid molecules can also be linked or fused to a heterologous nucleic acid sequence, such as in a vector, or a heterologous label. For example, the isolated nucleic acid molecules disclosed herein can be within a vector or as an exogenous donor sequence comprising the isolated nucleic acid molecule and a heterologous nucleic acid sequence. The isolated nucleic acid molecules can also be linked or fused to a heterologous label. The label can be directly detectable (such as, for example, fluorophore) or indirectly detectable (such as, for example, hapten, enzyme, or fluorophore quencher). Such labels can be detectable by spectroscopic, photochemical, biochemical, immunochemical, or chemical means. Such labels include, for example, radiolabels, pigments, dyes, chromogens, spin labels, and fluorescent labels. The label can also be, for example, a chemiluminescent substance; a metal-containing substance; or an enzyme, where there occurs an enzyme-dependent secondary generation of signal. The term “label” can also refer to a “tag” or hapten that can bind selectively to a conjugated molecule such that the conjugated molecule, when added subsequently along with a substrate, is used to generate a detectable signal. For example, biotin can be used as a tag along with an avidin or streptavidin conjugate of horseradish peroxidate (HRP) to bind to the tag, and examined using a calorimetric substrate (such as, for example, tetramethylbenzidine (TMB)) or a fluorogenic substrate to detect the presence of HRP. Exemplary labels that can be used as tags to facilitate purification include, but are not limited to, myc, HA, FLAG or 3×FLAG, 6×His or polyhistidine, glutathione-S-transferase (GST), maltose binding protein, an epitope tag, or the Fc portion of immunoglobulin. Numerous labels include, for example, particles, fluorophores, haptens, enzymes and their calorimetric, fluorogenic and chemiluminescent substrates and other labels.

[0402] The isolated nucleic acid molecules, or the complement thereof, can also be present within a host cell. In some embodiments, the host cell can comprise the vector that comprises any of the nucleic acid molecules described herein, or the complement thereof. In some embodiments, the nucleic acid molecule is operably linked to a promoter active in the host cell. In some embodiments, the promoter is an exogenous promoter. In some embodiments, the promoter is an inducible promoter. In some embodiments, the host cell is a bacterial cell, a yeast cell, an insect cell, or a mammalian cell. In some embodiments, the host cell is a bacterial cell. In some embodiments, the host cell is a yeast cell. In some embodiments, the host cell is an insect cell. In some embodiments, the host cell is a mammalian cell.

[0403] The disclosed nucleic acid molecules can comprise, for example, nucleotides or non-natural or modified nucleotides, such as nucleotide analogs or nucleotide substitutes. Such nucleotides include a nucleotide that contains a modified base, sugar, or phosphate group, or that incorporates a non-natural moiety in its structure. Examples of non-natural nucleotides include, but are not limited to, dideoxynucleotides, biotinylated, aminated, deaminated, alkylated, benzylated, and fluorophor-labeled nucleotides.

[0404] The nucleic acid molecules disclosed herein can also comprise one or more nucleotide analogs or substitutions. A nucleotide analog is a nucleotide which contains a modification to either the base, sugar, or phosphate moieties. Modifications to the base moiety include, but are not limited to, natural and synthetic modifications of A, C, G, and T/U, as well as different purine or pyrimidine bases such as, for example, pseudouridine, uracil-5-yl, hypoxanthin-9-yl (I), and 2-aminoadenin-9-yl. Modified bases include, but are not limited to, 5-methylcytosine (5-me-C), 5-hydroxymethyl cytosine, xanthine, hypoxanthine, 2-aminoadenine, 6-methyl and other alkyl derivatives of adenine and guanine, 2-propyl and other alkyl derivatives of adenine and guanine, 2-thiouracil, 2-thiothymine and 2-thiocytosine, 5-halouracil and cytosine, 5-propynyl uracil and cytosine, 6-azo uracil, cytosine and thymine, 5-uracil (pseudouracil), 4-thiouracil, 8-halo, 8-amino, 8-thiol, 8-thioalkyl, 8-hydroxyl and other 8-substituted adenines and guanines, 5-halo (such as, for example, 5-bromo), 5-trifluoromethyl and other 5-substituted uracils and cytosines, 7-methylguanine, 7-methyladenine, 8-azaguanine, 8-azaadenine, 7-deazaguanine, 7-deazaadenine, 3-deazaguanine, and 3-deazaadenine.

[0405] Nucleotide analogs can also include modifications of the sugar moiety. Modifications to the sugar moiety include, but are not limited to, natural modifications of the ribose and deoxy ribose as well as synthetic modifications. Sugar modifications include, but are not limited to, the following modifications at the 2′ position: OH; F; O-, S-, or N-alkyl; O-, S-, or N-alkenyl; O-, S- or N-alkynyl; or O-alkyl-O-alkyl, wherein the alkyl, alkenyl, and alkynyl may be substituted or unsubstituted C₁₋₁₀alkyl or C₂₋₁₀alkenyl, and C₂₋₁₀alkynyl. Exemplary 2′ sugar modifications also include, but are not limited to, —O[(CH₂)ₙO]ₘCH₃, —O(CH₂)ₙOCH₃, —O(CH₂)ₙNH₂, —O(CH₂)ₙCH₃, —O(CH₂)ₙ—ONH₂, and —O(CH₂)ₙON[(CH₂)ₙCH₃)]₂, where n and m, independently, are from 1 to about 10. Other modifications at the 2′ position include, but are not limited to, C₁₋₁₀alkyl, substituted lower alkyl, alkaryl, aralkyl, O-alkaryl or O-aralkyl, SH, SCH₃, OCN, Cl, Br, CN, CF₃, OCF₃, SOCH₃, SO₂CH₃, ONO₂, NO₂, N₃, NH₂, heterocycloalkyl, heterocycloalkaryl, aminoalkylamino, polyalkylamino, substituted silyl, an RNA cleaving group, a reporter group, an intercalator, a group for improving the pharmacokinetic properties of an oligonucleotide, or a group for improving the pharmacodynamic properties of an oligonucleotide, and other substituents having similar properties. Similar modifications may also be made at other positions on the sugar, particularly the 3′ position of the sugar on the 3′ terminal nucleotide or in 2′-5′ linked oligonucleotides and the 5′ position of 5′ terminal nucleotide. Modified sugars can also include those that contain modifications at the bridging ring oxygen, such as CH₂ and S. Nucleotide sugar analogs can also have sugar mimetics, such as cyclobutyl moieties in place of the pentofuranosyl sugar.

[0406] Nucleotide analogs can also be modified at the phosphate moiety. Modified phosphate moieties include, but are not limited to, those that can be modified so that the linkage between two nucleotides contains a phosphorothioate, chiral phosphorothioate, phosphorodithioate, phosphotriester, aminoalkylphosphotriester, methyl and other alkyl phosphonates including 3′-alkylene phosphonate and chiral phosphonates, phosphinates, phosphoramidates including 3′-amino phosphoramidate and aminoalkylphosphoramidates, thionophosphoramidates, thionoalkylphosphonates, thionoalkylphosphotriesters, and boranophosphates. These phosphate or modified phosphate linkage between two nucleotides can be through a 3′-5′ linkage or a 2′-5′ linkage, and the linkage can contain inverted polarity such as 3′-5′ to 5′-3′ or 2′-5′ to 5′-2′. Various salts, mixed salts, and free acid forms are also included. Nucleotide substitutes also include peptide nucleic acids (PNAs).

[0407] The present disclosure also provides vectors comprising any one or more of the nucleic acid molecules disclosed herein. In some embodiments, the vectors comprise any one or more of the nucleic acid molecules disclosed herein and a heterologous nucleic acid. The vectors can be viral or nonviral vectors capable of transporting a nucleic acid molecule. In some embodiments, the vector is a plasmid or cosmid (such as, for example, a circular double-stranded DNA into which additional DNA segments can be ligated). In some embodiments, the vector is a viral vector, wherein additional DNA segments can be ligated into the viral genome. Expression vectors include, but are not limited to, plasmids, cosmids, retroviruses, adenoviruses, adeno-associated viruses (AAV), plant viruses such as cauliflower mosaic virus and tobacco mosaic virus, yeast artificial chromosomes (YACs), Epstein-Barr (EBV)-derived episomes, and other expression vectors known in the art.

[0408] Desired regulatory sequences for mammalian host cell expression can include, for example, viral elements that direct high levels of polypeptide expression in mammalian cells, such as promoters and/or enhancers derived from retroviral LTRs, cytomegalovirus (CMV) (such as, for example, CMV promoter/enhancer), Simian Virus 40 (SV40) (such as, for example, SV40 promoter/enhancer), adenovirus, (such as, for example, the adenovirus major late promoter (AdMLP)), polyoma and strong mammalian promoters such as native immunoglobulin and actin promoters. Methods of expressing polypeptides in bacterial cells or fungal cells (such as, for example, yeast cells) are also well known. A promoter can be, for example, a constitutively active promoter, a conditional promoter, an inducible promoter, a temporally restricted promoter (such as, for example, a developmentally regulated promoter), or a spatially restricted promoter (such as, for example, a cell-specific or tissue-specific promoter).

[0409] Percent identity (or percent complementarity) between particular stretches of nucleotide sequences within nucleic acid molecules or amino acid sequences within polypeptides can be determined routinely using BLAST programs (basic local alignment search tools) and PowerBLAST programs (Altschul et al., J. Mol. Biol., 1990, 215, 403-410; Zhang and Madden, Genome Res., 1997, 7, 649-656) or by using the Gap program (Wisconsin Sequence Analysis Package, Version 8 for Unix, Genetics Computer Group, University Research Park, Madison Wis.), using default settings, which uses the algorithm of Smith and Waterman (Adv. Appl. Math., 1981, 2, 482-489). Herein, if reference is made to percent sequence identity, the higher percentages of sequence identity are preferred over the lower ones.

[0410] The present disclosure also provides compositions comprising any one or more of the isolated nucleic acid molecules, genomic nucleic acid molecules, mRNA molecules, and/or cDNA molecules disclosed herein. In some embodiments, the composition is a pharmaceutical composition. In some embodiments, the compositions comprise a carrier and/or excipient. Examples of carriers include, but are not limited to, poly(lactic acid) (PLA) microspheres, poly(D,L-lactic-coglycolic-acid) (PLGA) microspheres, liposomes, micelles, inverse micelles, lipid cochleates, and lipid microtubules. A carrier may comprise a buffered salt solution such as PBS, HBSS, etc.

[0411] As used herein, the phrase “corresponding to” or grammatical variations thereof when used in the context of the numbering of a particular nucleotide or nucleotide sequence or position refers to the numbering of a specified reference sequence when the particular nucleotide or nucleotide sequence is compared to a reference sequence (such as, for example, SEQ ID NO:1, SEQ ID NO:7, or SEQ ID NO:50). In other words, the residue (such as, for example, nucleotide or amino acid) number or residue (such as, for example, nucleotide or amino acid) position of a particular polymer is designated with respect to the reference sequence rather than by the actual numerical position of the residue within the particular nucleotide or nucleotide sequence. For example, a particular nucleotide sequence can be aligned to a reference sequence by introducing gaps to optimize residue matches between the two sequences. In these cases, although the gaps are present, the numbering of the residue in the particular nucleotide or nucleotide sequence is made with respect to the reference sequence to which it has been aligned.

[0412] For example, a WNT5B nucleic acid molecule comprising a nucleotide sequence encoding a WNT5B predicted loss-of-function polypeptide, wherein the nucleotide sequence comprises a thymine at a position corresponding to position 56,698 according to SEQ ID NO:2 means that if the nucleotide sequence of the WNT5B genomic nucleic acid molecule is aligned to the sequence of SEQ ID NO:2, the WNT5B sequence has a thymine residue at the position that corresponds to position 56,698 of SEQ ID NO:2. The same applies for a WNT5B mRNA molecules comprising a nucleotide sequence encoding a WNT5B predicted loss-of-function polypeptide, wherein the nucleotide sequence comprises a uracil at a position corresponding to position 242 according to SEQ ID NO:15, and a WNT5B cDNA molecules comprising a nucleotide sequence encoding a WNT5B predicted loss-of-function polypeptide, wherein the nucleotide sequence comprises a thymine at a position corresponding to position 242 according to SEQ ID NO:58. In other words, these phrases refer to a nucleic acid molecule encoding a WNT5B polypeptide, wherein the genomic nucleic acid molecule has a nucleotide sequence that comprises a thymine residue that is homologous to the thymine residue at position 56,698 of SEQ ID NO:2 (or wherein the mRNA molecule has a nucleotide sequence that comprises a uracil residue that is homologous to the uracil residue at position 242 of SEQ ID NO:15, or wherein the cDNA molecule has a nucleotide sequence that comprises a thymine residue that is homologous to the thymine residue at position 242 of SEQ ID NO:58).

[0413] As described herein, a position within a WNT5B genomic nucleic acid molecule that corresponds to position 56,698 according to SEQ ID NO:2, for example, can be identified by performing a sequence alignment between the nucleotide sequence of a particular WNT5B nucleic acid molecule and the nucleotide sequence of SEQ ID NO:2. A variety of computational algorithms exist that can be used for performing a sequence alignment to identify a nucleotide position that corresponds to, for example, position 56,698 in SEQ ID NO:2. For example, by using the NCBI BLAST algorithm (Altschul et al., Nucleic Acids Res., 1997, 25, 3389-3402) or CLUSTALW software (Sievers and Higgins, Methods Mol. Biol., 2014, 1079, 105-116) sequence alignments may be performed. However, sequences can also be aligned manually.

[0414] The amino acid sequences of WNT5B reference polypeptides are set forth in SEQ ID NO:93 (Isoform 1), SEQ ID NO:94 (Isoform 2), SEQ ID NO:95 (Isoform 3).

[0415] Referring to SEQ ID NO:93 (Isoform 1), the WNT5B reference polypeptide is 359 amino acids in length. Referring to SEQ ID NO:93, position 83 is a cysteine. Referring to SEQ ID NO:93, position 134 is an arginine. Referring to SEQ ID NO:93, position 134 is an arginine. Referring to SEQ ID NO:93, position 226 is a valine.

[0416] Referring to SEQ ID NO:94 (Isoform 2), the WNT5B reference polypeptide is 112 amino acids in length. Referring to SEQ ID NO:94, position 83 is a cysteine.

[0417] Referring to SEQ ID NO:95 (Isoform 3), the WNT5B reference polypeptide is 284 amino acids in length. Referring to SEQ ID NO:95, position 114 is a cysteine. Referring to SEQ ID NO:95, position 134 is an arginine. Referring to SEQ ID NO:95, position 134 is an arginine.

[0418] The amino acid sequences of WNT5B predicted loss-of-function polypeptides are set forth in SEQ ID NO:96 (Isoform 1), SEQ ID NO:97 (Isoform 2), SEQ ID NO:98 (Isoform 3). Referring to SEQ ID NO:96, (Cys83Stop-LG; Isoform 1), position 83 is a stop codon. Referring to SEQ ID NO:97, (Cys83Stop-Sht; Isoform 2), position 83 is a stop codon. Referring to SEQ ID NO:98, (Cys114Stop; Isoform 3), position 114 is a stop codon.

[0419] The amino acid sequences of WNT5B predicted loss-of-function polypeptides are also set forth in SEQ ID NO:99 (Isoform 1), SEQ ID NO:100 (Isoform 3). Referring to SEQ ID NO:99, (Arg134Cys-LG; Isoform 1), position 134 is a cysteine.

[0420] The amino acid sequences of WNT5B predicted loss-of-function polypeptides are also set forth in SEQ ID NO:101 (Isoform 1), SEQ ID NO:102 (Isoform 3). Referring to SEQ ID NO:101, (Arg134Ser-LG; Isoform 3), position 134 is a cysteine. Referring to SEQ ID NO:102, (Arg134Ser-Sht; Isoform 2), position 134 is a cysteine.

[0421] The amino acid sequences of WNT5B predicted loss-of-function polypeptides are also set forth in SEQ ID NO:103 (Isoform 1). Referring to SEQ ID NO:103, (or Val266fs; Isoform 1), position 266 is a glutamic acid.

[0422] The present disclosure also provides isolated WNT5B predicted loss-of-function polypeptides having an amino acid sequence at least about 90% identical to: SEQ ID NO:96, and comprising a stop codon at a position corresponding to position 83 according to SEQ ID NO:96; SEQ ID NO:97, and comprising a stop codon at a position corresponding to position 83 according to SEQ ID NO:97; SEQ ID NO:98, and comprising a stop codon at a position corresponding to position 114 according to SEQ ID NO:98; or SEQ ID NO:103, and comprising a glutamic acid at a position corresponding to position 266 according to SEQ ID NO:103.

[0423] In some embodiments, the isolated WNT5B predicted loss-of-function polypeptide comprises SEQ ID NO:96, SEQ ID NO:97, or SEQ ID NO:98. In some embodiments, the isolated WNT5B predicted loss-of-function polypeptide comprises SEQ ID NO:96. In some embodiments, the isolated WNT5B predicted loss-of-function polypeptide comprises SEQ ID NO:97. In some embodiments, the isolated WNT5B predicted loss-of-function polypeptide comprises SEQ ID NO:98. In some embodiments, the isolated WNT5B predicted loss-of-function polypeptide consists of SEQ ID NO:96, SEQ ID NO:97, or SEQ ID NO:98. In some embodiments, the isolated WNT5B predicted loss-of-function polypeptide consists of SEQ ID NO:96. In some embodiments, the isolated WNT5B predicted loss-of-function polypeptide consists of SEQ ID NO:97. In some embodiments, the isolated WNT5B predicted loss-of-function polypeptide consists of SEQ ID NO:98.

[0424] In some embodiments, the isolated WNT5B predicted loss-of-function polypeptide comprises SEQ ID NO:103. In some embodiments, the isolated WNT5B predicted loss-of-function polypeptide comprises SEQ ID NO:103. In some embodiments, the isolated WNT5B predicted loss-of-function polypeptide consists of SEQ ID NO:103. In some embodiments, the isolated WNT5B predicted loss-of-function polypeptide consists of SEQ ID NO:103.

[0425] The present disclosure also provides isolated WNT5B predicted loss-of-function polypeptides having an amino acid sequence at least about 90%, at least about 91%, at least about 92%, at least about 93%, at least about 94%, at least about 95%, at least about 96%, at least about 97%, at least about 98%, or at least about 99% identical to: SEQ ID NO:96, and comprising a stop codon at a position corresponding to position 83 according to SEQ ID NO:96; SEQ ID NO:97, and comprising a stop codon at a position corresponding to position 83 according to SEQ ID NO:97; or SEQ ID NO:98, and comprising a stop codon at a position corresponding to position 114 according to SEQ ID NO:98. In some embodiments, the isolated WNT5B polypeptides have an amino acid sequence at least about 90% identical to: SEQ ID NO:96, and comprising a stop codon at a position corresponding to position 83 according to SEQ ID NO:96; SEQ ID NO:97, and comprising a stop codon at a position corresponding to position 83 according to SEQ ID NO:97; or SEQ ID NO:98, and comprising a stop codon at a position corresponding to position 114 according to SEQ ID NO:98. In some embodiments, the isolated WNT5B polypeptides have an amino acid sequence at least about 92% identical to: SEQ ID NO:96, and comprising a stop codon at a position corresponding to position 83 according to SEQ ID NO:96; SEQ ID NO:97, and comprising a stop codon at a position corresponding to position 83 according to SEQ ID NO:97; or SEQ ID NO:98, and comprising a stop codon at a position corresponding to position 114 according to SEQ ID NO:98. In some embodiments, the isolated WNT5B polypeptides have an amino acid sequence at least about 94% identical to: SEQ ID NO:96, and comprising a stop codon at a position corresponding to position 83 according to SEQ ID NO:96; SEQ ID NO:97, and comprising a stop codon at a position corresponding to position 83 according to SEQ ID NO:97; or SEQ ID NO:98, and comprising a stop codon at a position corresponding to position 114 according to SEQ ID NO:98. In some embodiments, the isolated WNT5B polypeptides have an amino acid sequence at least about 96% identical to: SEQ ID NO:96, and comprising a stop codon at a position corresponding to position 83 according to SEQ ID NO:96; SEQ ID NO:97, and comprising a stop codon at a position corresponding to position 83 according to SEQ ID NO:97; or SEQ ID NO:98, and comprising a stop codon at a position corresponding to position 114 according to SEQ ID NO:98. In some embodiments, the isolated WNT5B polypeptides have an amino acid sequence at least about 98% identical to: SEQ ID NO:96, and comprising a stop codon at a position corresponding to position 83 according to SEQ ID NO:96; SEQ ID NO:97, and comprising a stop codon at a position corresponding to position 83 according to SEQ ID NO:97; or SEQ ID NO:98, and comprising a stop codon at a position corresponding to position 114 according to SEQ ID NO:98.

[0426] The present disclosure also provides isolated WNT5B predicted loss-of-function polypeptides having an amino acid sequence at least about 90%, at least about 91%, at least about 92%, at least about 93%, at least about 94%, at least about 95%, at least about 96%, at least about 97%, at least about 98%, or at least about 99% identical to SEQ ID NO:103, and comprising a glutamic acid at a position corresponding to position 266 according to SEQ ID NO:103. In some embodiments, the isolated WNT5B polypeptides have an amino acid sequence at least about 90% identical to SEQ ID NO:103, and comprising a glutamic acid at a position corresponding to position 266 according to SEQ ID NO:103. In some embodiments, the isolated WNT5B polypeptides have an amino acid sequence at least about 92% identical to SEQ ID NO:103, and comprising a glutamic acid at a position corresponding to position 266 according to SEQ ID NO:103. In some embodiments, the isolated WNT5B polypeptides have an amino acid sequence at least about 94% identical to SEQ ID NO:103, and comprising a glutamic acid at a position corresponding to position 266 according to SEQ ID NO:103. In some embodiments, the isolated WNT5B polypeptides have an amino acid sequence at least about 96% identical to SEQ ID NO:103, and comprising a glutamic acid at a position corresponding to position 266 according to SEQ ID NO:103. In some embodiments, the isolated WNT5B polypeptides have an amino acid sequence at least about 98% identical to SEQ ID NO:103, and comprising a glutamic acid at a position corresponding to position 266 according to SEQ ID NO:103.

[0427] In some embodiments, the isolated WNT5B predicted loss-of-function polypeptides comprise or consist of at least about 15, at least about 20, at least about 25, at least about 30, at least about 35, at least about 40, at least about 45, at least about 50, at least about 60, at least about 70, at least about 80, at least about 90, at least about 100, at least about 150, at least about 200, at least about 250, at least about 300, at least about 350, at least about 400, at least about 450, at least about 500, at least about 550, or at least about 600 contiguous amino acids of any of the WNT5B predicted loss-of-function polypeptides disclosed herein. In some embodiments, the isolated polypeptides comprise: a stop codon at a position corresponding to position 83 according to SEQ ID NO:96; a stop codon at a position corresponding to position 83 according to SEQ ID NO:97; or a stop codon at a position corresponding to position 114 according to SEQ ID NO:98. In some embodiments, the isolated polypeptides comprise a glutamic acid at a position corresponding to position 266 according to SEQ ID NO:103.

[0428] In some embodiments, the isolated WNT5B predicted loss-of-function polypeptides comprise or consist of an amino acid sequence at least about 70%, at least about 75%, at least about 80%, at least about 85%, at least about 90%, at least about 91%, at least about 92%, at least about 93%, at least about 94%, at least about 95%, at least about 96%, at least about 97%, at least about 98%, at least about 99%, or 100% identical to at least about 8, at least about 10, at least about 15, at least about 20, at least about 25, at least about 30, at least about 35, at least about 40, at least about 45, at least about 50, at least about 60, at least about 70, at least about 80, at least about 90, at least about 100, at least about 150, at least about 200, at least about 250, at least about 300, at least about 350, at least about 400, at least about 450, at least about 500, at least about 550, or at least about 600 contiguous amino acids of any of the WNT5B predicted loss-of-function polypeptides disclosed herein. In some embodiments, the isolated polypeptides comprise or consist of an amino acid sequence at least about 90%, at least about 91%, at least about 92%, at least about 93%, at least about 94%, at least about 95%, at least about 96%, at least about 97%, at least about 98%, at least about 99%, or 100% identical to at least about 8, at least about 10, at least about 15, at least about 20, at least about 25, at least about 30, at least about 35, at least about 40, at least about 45, at least about 50, at least about 60, at least about 70, at least about 80, at least about 90, at least about 100, at least about 150, at least about 200, at least about 250, at least about 300, at least about 350, at least about 400, at least about 450, at least about 500, at least about 550, or at least about 600 contiguous amino acids of any of the WNT5B predicted loss-of-function polypeptides disclosed herein. In some embodiments, the isolated polypeptides comprise: a stop codon at a position corresponding to position 83 according to SEQ ID NO:96; a stop codon at a position corresponding to position 83 according to SEQ ID NO:97; or a stop codon at a position corresponding to position 114 according to SEQ ID NO:98. In some embodiments, the isolated polypeptides comprise a glutamic acid at a position corresponding to position 266 according to SEQ ID NO:103.

[0429] The isolated polypeptides disclosed herein can comprise an amino acid sequence of a naturally occurring WNT5B polypeptide, or can comprise a non-naturally occurring sequence. In some embodiments, the naturally occurring sequence can differ from the non-naturally occurring sequence due to conservative amino acid substitutions. For example, the sequence can be identical with the exception of conservative amino acid substitutions.

[0430] In some embodiments, the isolated polypeptides comprise non-natural or modified amino acids or peptide analogs. For example, there are numerous D-amino acids or amino acids which have a different functional substituent than the naturally occurring amino acids.

[0431] The present disclosure also provides nucleic acid molecules encoding any of the polypeptides disclosed herein. This includes all degenerate sequences related to a specific polypeptide sequence (i.e., all nucleic acids having a sequence that encodes one particular polypeptide sequence as well as all nucleic acids, including degenerate nucleic acids, encoding the disclosed variants and derivatives of the protein sequences). Thus, while each particular nucleic acid sequence may not be written out herein, each and every sequence is in fact disclosed and described herein through the disclosed polypeptide sequences.

[0432] The present disclosure also provides compositions comprising any one or more of the nucleic acid molecules and/or any one or more of the polypeptides disclosed herein. In some embodiments, the compositions comprise a carrier. Examples of carriers include, but are not limited to, poly(lactic acid) (PLA) microspheres, poly(D,L-lactic-coglycolic-acid) (PLGA) microspheres, liposomes, micelles, inverse micelles, lipid cochleates, and lipid microtubules.

[0433] The present disclosure also provides methods of producing any of the WNT5B predicted loss-of-function polypeptides or fragments thereof disclosed herein. Such WNT5B predicted loss-of-function polypeptides or fragments thereof can be produced by any suitable method.

[0434] The present disclosure also provides cells comprising any one or more of the nucleic acid molecules and/or any one or more of the polypeptides disclosed herein. The cells can be in vitro, ex vivo, or in vivo. Nucleic acid molecules can be linked to a promoter and other regulatory sequences so they are expressed to produce an encoded protein.

[0435] In some embodiments, the cell is a totipotent cell or a pluripotent cell such as, for example, an embryonic stem (ES) cell such as a rodent ES cell, a mouse ES cell, or a rat ES cell. In some embodiments, the cell is a primary somatic cell, or a cell that is not a primary somatic cell. The cell can be from any source. For example, the cell can be a eukaryotic cell, an animal cell, a plant cell, or a fungal (such as, for example, yeast) cell. Such cells can be fish cells or bird cells, or such cells can be mammalian cells, such as human cells, non-human mammalian cells, rodent cells, mouse cells or rat cells. Mammals include, but are not limited to, humans, non-human primates, monkeys, apes, cats dogs, horses, bulls, deer, bison, sheep, rodents (such as, for example, mice, rats, hamsters, guinea pigs), livestock (such as, for example, bovine species such as cows, steer, etc.; ovine species such as sheep, goats, etc.; and porcine species such as pigs and boars). The term “non-human animal” excludes humans.

[0436] The nucleotide and amino acid sequences listed in the accompanying sequence listing are shown using standard letter abbreviations for nucleotide bases, and three-letter code for amino acids. The nucleotide sequences follow the standard convention of beginning at the 5′ end of the sequence and proceeding forward (i.e., from left to right in each line) to the 3′ end. Only one strand of each nucleotide sequence is shown, but the complementary strand is understood to be included by any reference to the displayed strand. The amino acid sequence follows the standard convention of beginning at the amino terminus of the sequence and proceeding forward (i.e., from left to right in each line) to the carboxy terminus.

[0437] The present disclosure also provides therapeutic agents that treat or prevent decreased bone mineral density for use in the treatment or prevention of decreased bone mineral density in a subject, wherein the subject has any of the WNT5B variant genomic nucleic acid molecules, variant mRNA molecules, and/or variant cDNA molecules encoding a WNT5B predicted loss-of-function polypeptide described herein. The therapeutic agents that treat or prevent decreased bone mineral density can be any of the therapeutic agents that treat or prevent decreased bone mineral density described herein. The decreased bone mineral density can be osteopenia, Type I osteoporosis, Type II osteoporosis, or secondary osteoporosis.

[0438] The present disclosure also provides therapeutic agents that treat or prevent decreased bone mineral density for use in the preparation of a medicament for treating or preventing decreased bone mineral density in a subject, wherein the subject has any of the WNT5B variant genomic nucleic acid molecules, variant mRNA molecules, and/or variant cDNA molecules encoding a WNT5B predicted loss-of-function polypeptide described herein. The therapeutic agents that treat or prevent decreased bone mineral density can be any of the therapeutic agents that treat or prevent decreased bone mineral density described herein. The decreased bone mineral density can be osteopenia, Type I osteoporosis, Type II osteoporosis, or secondary osteoporosis.

[0439] In some embodiments, the subject is identified as having a genomic nucleic acid molecule encoding a WNT5B predicted loss-of-function polypeptide, wherein the genomic nucleic acid molecule has a nucleotide sequence comprising: a thymine at a position corresponding to position 56,698 according to SEQ ID NO:2, or the complement thereof; an adenine at a position corresponding to position 58,170 according to SEQ ID NO:3, or the complement thereof; a thymine at a position corresponding to position 65,099 according to SEQ ID NO:4, or the complement thereof; an adenine at a position corresponding to position 65,099 according to SEQ ID NO:5, or the complement thereof; or a deletion of a TC dinucleotide at positions corresponding to positions 71,313-71,314 according to SEQ ID NO:6, or the complement thereof.

[0440] In some embodiments, the subject is identified as having an mRNA molecule encoding a WNT5B predicted loss-of-function polypeptide, wherein the mRNA molecule has a nucleotide sequence comprising: a uracil at a position corresponding to position 242 according to SEQ ID NO:15, or the complement thereof; a uracil at a position corresponding to position 145 according to SEQ ID NO:16, or the complement thereof; a uracil at a position corresponding to position 198 according to SEQ ID NO:17, or the complement thereof; a uracil at a position corresponding to position 40 according to SEQ ID NO:18, or the complement thereof; a uracil at a position corresponding to position 145 according to SEQ ID NO:19, or the complement thereof; a uracil at a position corresponding to position 183 according to SEQ ID NO:20, or the complement thereof; a uracil at a position corresponding to position 543 according to SEQ ID NO:21, or the complement thereof; an adenine at a position corresponding to position 491 according to SEQ ID NO:22, or the complement thereof; an adenine at a position corresponding to position 394 according to SEQ ID NO:23, or the complement thereof; an adenine at a position corresponding to position 447 according to SEQ ID NO:24, or the complement thereof; an adenine at a position corresponding to position 289 according to SEQ ID NO:25, or the complement thereof; an adenine at a position corresponding to position 394 according to SEQ ID NO:26, or the complement thereof; an adenine at a position corresponding to position 432 according to SEQ ID NO:27, or the complement thereof; an adenine at a position corresponding to position 792 according to SEQ ID NO:28, or the complement thereof; an adenine at a position corresponding to position 254 according to SEQ ID NO:29, or the complement thereof; a uracil at a position corresponding to position 642 according to SEQ ID NO:30, or the complement thereof; a uracil at a position corresponding to position 545 according to SEQ ID NO:31, or the complement thereof; a uracil at a position corresponding to position 598 according to SEQ ID NO:32, or the complement thereof; a uracil at a position corresponding to position 545 according to SEQ ID NO:33, or the complement thereof; a uracil at a position corresponding to position 583 according to SEQ ID NO:34, or the complement thereof; a uracil at a position corresponding to position 943 according to SEQ ID NO:35, or the complement thereof; a uracil at a position corresponding to position 405 according to SEQ ID NO:36, or the complement thereof; an adenine at a position corresponding to position 642 according to SEQ ID NO:37, or the complement thereof; an adenine at a position corresponding to position 545 according to SEQ ID NO:38, or the complement thereof; an adenine at a position corresponding to position 598 according to SEQ ID NO:39, or the complement thereof; an adenine at a position corresponding to position 545 according to SEQ ID NO:40, or the complement thereof; an adenine at a position corresponding to position 583 according to SEQ ID NO:41, or the complement thereof; an adenine at a position corresponding to position 943 according to SEQ ID NO:42, or the complement thereof; an adenine at a position corresponding to position 405 according to SEQ ID NO:43, or the complement thereof; a deletion of a UC dinucleotide at positions corresponding to positions 1,039-1,040 according to SEQ ID NO:44, or the complement thereof; a deletion of a UC dinucleotide at positions corresponding to positions 942-943 according to SEQ ID NO:45, or the complement thereof; a deletion of a UC dinucleotide at positions corresponding to positions 995-996 according to SEQ ID NO:46, or the complement thereof; a deletion of a UC dinucleotide at positions corresponding to positions 942-943 according to SEQ ID NO:47, or the complement thereof; a deletion of a UC dinucleotide at positions corresponding to positions 980-981 according to SEQ ID NO:48, or the complement thereof; or a deletion of a UC dinucleotide at positions corresponding to positions 802-803 according to SEQ ID NO:49, or the complement thereof.

[0441] In some embodiments, the subject is identified as having a cDNA molecule encoding a WNT5B predicted loss-of-function polypeptide, wherein the cDNA molecule has a nucleotide sequence comprising: a thymine at a position corresponding to position 242 according to SEQ ID NO:58, or the complement thereof; a thymine at a position corresponding to position 145 according to SEQ ID NO:59, or the complement thereof; a thymine at a position corresponding to position 198 according to SEQ ID NO:60, or the complement thereof; a thymine at a position corresponding to position 40 according to SEQ ID NO:61, or the complement thereof; a thymine at a position corresponding to position 145 according to SEQ ID NO:62, or the complement thereof; a thymine at a position corresponding to position 183 according to SEQ ID NO:63, or the complement thereof; a thymine at a position corresponding to position 543 according to SEQ ID NO:64, or the complement thereof; an adenine at a position corresponding to position 491 according to SEQ ID NO:65, or the complement thereof; an adenine at a position corresponding to position 394 according to SEQ ID NO:66, or the complement thereof; an adenine at a position corresponding to position 447 according to SEQ ID NO:67, or the complement thereof; an adenine at a position corresponding to position 289 according to SEQ ID NO:68, or the complement thereof; an adenine at a position corresponding to position 394 according to SEQ ID NO:69, or the complement thereof; an adenine at a position corresponding to position 432 according to SEQ ID NO:70, or the complement thereof; an adenine at a position corresponding to position 792 according to SEQ ID NO:71, or the complement thereof; an adenine at a position corresponding to position 254 according to SEQ ID NO:72, or the complement thereof; a thymine at a position corresponding to position 642 according to SEQ ID NO:73, or the complement thereof; a thymine at a position corresponding to position 545 according to SEQ ID NO:74, or the complement thereof; a thymine at a position corresponding to position 598 according to SEQ ID NO:75, or the complement thereof; a thymine at a position corresponding to position 545 according to SEQ ID NO:76, or the complement thereof; a thymine at a position corresponding to position 583 according to SEQ ID NO:77, or the complement thereof; a thymine at a position corresponding to position 943 according to SEQ ID NO:78, or the complement thereof; a thymine at a position corresponding to position 405 according to SEQ ID NO:79, or the complement thereof; an adenine at a position corresponding to position 642 according to SEQ ID NO:80, or the complement thereof; an adenine at a position corresponding to position 545 according to SEQ ID NO:81, or the complement thereof; an adenine at a position corresponding to position 598 according to SEQ ID NO:82, or the complement thereof; an adenine at a position corresponding to position 545 according to SEQ ID NO:83, or the complement thereof; an adenine at a position corresponding to position 583 according to SEQ ID NO:84, or the complement thereof; an adenine at a position corresponding to position 943 according to SEQ ID NO:85, or the complement thereof; an adenine at a position corresponding to position 405 according to SEQ ID NO:86, or the complement thereof; a deletion of a TC dinucleotide at positions corresponding to positions 1,039-1,040 according to SEQ ID NO:87, or the complement thereof; a deletion of a TC dinucleotide at positions corresponding to positions 942-943 according to SEQ ID NO:88, or the complement thereof; a deletion of a TC dinucleotide at positions corresponding to positions 995-996 according to SEQ ID NO:89, or the complement thereof; a deletion of a TC dinucleotide at positions corresponding to positions 942-943 according to SEQ ID NO:90, or the complement thereof; a deletion of a TC dinucleotide at positions corresponding to positions 980-981 according to SEQ ID NO:91, or the complement thereof; or a deletion of a TC dinucleotide at positions corresponding to positions 802-803 according to SEQ ID NO:92, or the complement thereof.

[0442] In some embodiments, the subject is identified as having: i) a genomic nucleic acid molecule having a nucleotide sequence encoding a WNT5B predicted loss-of-function polypeptide, wherein the nucleotide sequence comprises a thymine at a position corresponding to position 56,698 according to SEQ ID NO:2, or the complement thereof; ii) an mRNA molecule having a nucleotide sequence encoding a WNT5B predicted loss-of-function polypeptide, wherein the nucleotide sequence comprises: a uracil at a position corresponding to position 242 according to SEQ ID NO:15, or the complement thereof; a uracil at a position corresponding to position 145 according to SEQ ID NO:16, or the complement thereof; a uracil at a position corresponding to position 198 according to SEQ ID NO:17, or the complement thereof; a uracil at a position corresponding to position 40 according to SEQ ID NO:18, or the complement thereof; a uracil at a position corresponding to position 145 according to SEQ ID NO:19, or the complement thereof; a uracil at a position corresponding to position 183 according to SEQ ID NO:20, or the complement thereof; or a uracil at a position corresponding to position 543 according to SEQ ID NO:21, or the complement thereof; or iii) a cDNA molecule having a nucleotide sequence encoding a WNT5B predicted loss-of-function polypeptide, wherein the nucleotide sequence comprises: a thymine at a position corresponding to position 242 according to SEQ ID NO:58, or the complement thereof; a thymine at a position corresponding to position 145 according to SEQ ID NO:59, or the complement thereof; a thymine at a position corresponding to position 198 according to SEQ ID NO:60, or the complement thereof; a thymine at a position corresponding to position 40 according to SEQ ID NO:61, or the complement thereof; a thymine at a position corresponding to position 145 according to SEQ ID NO:62, or the complement thereof; a thymine at a position corresponding to position 183 according to SEQ ID NO:63, or the complement thereof; or a thymine at a position corresponding to position 543 according to SEQ ID NO:64, or the complement thereof.

[0443] In some embodiments, the subject is identified as having a genomic nucleic acid molecule having a nucleotide sequence encoding a WNT5B predicted loss-of-function polypeptide, wherein the nucleotide sequence comprises a thymine at a position corresponding to position 56,698 according to SEQ ID NO:2, or the complement thereof.

[0444] In some embodiments, the subject is identified as having an mRNA molecule having a nucleotide sequence encoding a WNT5B predicted loss-of-function polypeptide, wherein the nucleotide sequence comprises: a uracil at a position corresponding to position 242 according to SEQ ID NO:15, or the complement thereof; a uracil at a position corresponding to position 145 according to SEQ ID NO:16, or the complement thereof; a uracil at a position corresponding to position 198 according to SEQ ID NO:17, or the complement thereof; a uracil at a position corresponding to position 40 according to SEQ ID NO:18, or the complement thereof; a uracil at a position corresponding to position 145 according to SEQ ID NO:19, or the complement thereof; a uracil at a position corresponding to position 183 according to SEQ ID NO:20, or the complement thereof; or a uracil at a position corresponding to position 543 according to SEQ ID NO:21, or the complement thereof.

[0445] In some embodiments, the subject is identified as having a cDNA molecule having a nucleotide sequence encoding a WNT5B predicted loss-of-function polypeptide, wherein the nucleotide sequence comprises: a thymine at a position corresponding to position 242 according to SEQ ID NO:58, or the complement thereof; a thymine at a position corresponding to position 145 according to SEQ ID NO:59, or the complement thereof; a thymine at a position corresponding to position 198 according to SEQ ID NO:60, or the complement thereof; a thymine at a position corresponding to position 40 according to SEQ ID NO:61, or the complement thereof; a thymine at a position corresponding to position 145 according to SEQ ID NO:62, or the complement thereof; a thymine at a position corresponding to position 183 according to SEQ ID NO:63, or the complement thereof; or a thymine at a position corresponding to position 543 according to SEQ ID NO:64, or the complement thereof.

[0446] In some embodiments, the subject is identified as having: i) a genomic nucleic acid molecule having a nucleotide sequence encoding a WNT5B predicted loss-of-function polypeptide, wherein the nucleotide sequence comprises an adenine at a position corresponding to position 58,170 according to SEQ ID NO:3, or the complement thereof; ii) an mRNA molecule having a nucleotide sequence encoding a WNT5B predicted loss-of-function polypeptide, wherein the nucleotide sequence comprises: an adenine at a position corresponding to position 491 according to SEQ ID NO:22, or the complement thereof; an adenine at a position corresponding to position 394 according to SEQ ID NO:23, or the complement thereof; an adenine at a position corresponding to position 447 according to SEQ ID NO:24, or the complement thereof; an adenine at a position corresponding to position 289 according to SEQ ID NO:25, or the complement thereof; an adenine at a position corresponding to position 394 according to SEQ ID NO:26, or the complement thereof; an adenine at a position corresponding to position 432 according to SEQ ID NO:27, or the complement thereof; an adenine at a position corresponding to position 792 according to SEQ ID NO:28, or the complement thereof; or an adenine at a position corresponding to position 254 according to SEQ ID NO:29, or the complement thereof; or iii) a cDNA molecule having a nucleotide sequence encoding a WNT5B predicted loss-of-function polypeptide, wherein the nucleotide sequence comprises: an adenine at a position corresponding to position 491 according to SEQ ID NO:65, or the complement thereof; an adenine at a position corresponding to position 394 according to SEQ ID NO:66, or the complement thereof; an adenine at a position corresponding to position 447 according to SEQ ID NO:67, or the complement thereof; an adenine at a position corresponding to position 289 according to SEQ ID NO:68, or the complement thereof; an adenine at a position corresponding to position 394 according to SEQ ID NO:69, or the complement thereof; an adenine at a position corresponding to position 432 according to SEQ ID NO:70, or the complement thereof; an adenine at a position corresponding to position 792 according to SEQ ID NO:71, or the complement thereof; or an adenine at a position corresponding to position 254 according to SEQ ID NO:72, or the complement thereof.

[0447] In some embodiments, the subject is identified as having a genomic nucleic acid molecule having a nucleotide sequence encoding a WNT5B predicted loss-of-function polypeptide, wherein the nucleotide sequence comprises an adenine at a position corresponding to position 58,170 according to SEQ ID NO:3, or the complement thereof.

[0448] In some embodiments, the subject is identified as having an mRNA molecule having a nucleotide sequence encoding a WNT5B predicted loss-of-function polypeptide, wherein the nucleotide sequence comprises: an adenine at a position corresponding to position 491 according to SEQ ID NO:22, or the complement thereof; an adenine at a position corresponding to position 394 according to SEQ ID NO:23, or the complement thereof; an adenine at a position corresponding to position 447 according to SEQ ID NO:24, or the complement thereof; an adenine at a position corresponding to position 289 according to SEQ ID NO:25, or the complement thereof; an adenine at a position corresponding to position 394 according to SEQ ID NO:26, or the complement thereof; an adenine at a position corresponding to position 432 according to SEQ ID NO:27, or the complement thereof; an adenine at a position corresponding to position 792 according to SEQ ID NO:28, or the complement thereof; or an adenine at a position corresponding to position 254 according to SEQ ID NO:29, or the complement thereof.

[0449] In some embodiments, the subject is identified as having a cDNA molecule having a nucleotide sequence encoding a WNT5B predicted loss-of-function polypeptide, wherein the nucleotide sequence comprises: an adenine at a position corresponding to position 491 according to SEQ ID NO:65, or the complement thereof; an adenine at a position corresponding to position 394 according to SEQ ID NO:66, or the complement thereof; an adenine at a position corresponding to position 447 according to SEQ ID NO:67, or the complement thereof; an adenine at a position corresponding to position 289 according to SEQ ID NO:68, or the complement thereof; an adenine at a position corresponding to position 394 according to SEQ ID NO:69, or the complement thereof; an adenine at a position corresponding to position 432 according to SEQ ID NO:70, or the complement thereof; an adenine at a position corresponding to position 792 according to SEQ ID NO:71, or the complement thereof; or an adenine at a position corresponding to position 254 according to SEQ ID NO:72, or the complement thereof.

[0450] In some embodiments, the subject is identified as having: i) a genomic nucleic acid molecule having a nucleotide sequence encoding a WNT5B predicted loss-of-function polypeptide, wherein the nucleotide sequence comprises a thymine at a position corresponding to position 65,099 according to SEQ ID NO:4, or the complement thereof; ii) an mRNA molecule having a nucleotide sequence encoding a WNT5B predicted loss-of-function polypeptide, wherein the nucleotide sequence comprises: a uracil at a position corresponding to position 642 according to SEQ ID NO:30, or the complement thereof; a uracil at a position corresponding to position 545 according to SEQ ID NO:31, or the complement thereof; a uracil at a position corresponding to position 598 according to SEQ ID NO:32, or the complement thereof; a uracil at a position corresponding to position 545 according to SEQ ID NO:33, or the complement thereof; a uracil at a position corresponding to position 583 according to SEQ ID NO:34, or the complement thereof; a uracil at a position corresponding to position 943 according to SEQ ID NO:35, or the complement thereof; or a uracil at a position corresponding to position 405 according to SEQ ID NO:36, or the complement thereof; or iii) a cDNA molecule having a nucleotide sequence encoding a WNT5B predicted loss-of-function polypeptide, wherein the nucleotide sequence comprises: a thymine at a position corresponding to position 642 according to SEQ ID NO:73, or the complement thereof; a thymine at a position corresponding to position 545 according to SEQ ID NO:74, or the complement thereof; a thymine at a position corresponding to position 598 according to SEQ ID NO:75, or the complement thereof; a thymine at a position corresponding to position 545 according to SEQ ID NO:76, or the complement thereof; a thymine at a position corresponding to position 583 according to SEQ ID NO:77, or the complement thereof; a thymine at a position corresponding to position 943 according to SEQ ID NO:78, or the complement thereof; or a thymine at a position corresponding to position 405 according to SEQ ID NO:79, or the complement thereof.

[0451] In some embodiments, the subject is identified as having a genomic nucleic acid molecule having a nucleotide sequence encoding a WNT5B predicted loss-of-function polypeptide, wherein the nucleotide sequence comprises a thymine at a position corresponding to position 65,099 according to SEQ ID NO:4, or the complement thereof.

[0452] In some embodiments, the subject is identified as having an mRNA molecule having a nucleotide sequence encoding a WNT5B predicted loss-of-function polypeptide, wherein the nucleotide sequence comprises: a uracil at a position corresponding to position 642 according to SEQ ID NO:30, or the complement thereof; a uracil at a position corresponding to position 545 according to SEQ ID NO:31, or the complement thereof; a uracil at a position corresponding to position 598 according to SEQ ID NO:32, or the complement thereof; a uracil at a position corresponding to position 545 according to SEQ ID NO:33, or the complement thereof; a uracil at a position corresponding to position 583 according to SEQ ID NO:34, or the complement thereof; a uracil at a position corresponding to position 943 according to SEQ ID NO:35, or the complement thereof; or a uracil at a position corresponding to position 405 according to SEQ ID NO:36, or the complement thereof.

[0453] In some embodiments, the subject is identified as having a cDNA molecule having a nucleotide sequence encoding a WNT5B predicted loss-of-function polypeptide, wherein the nucleotide sequence comprises: a thymine at a position corresponding to position 642 according to SEQ ID NO:73, or the complement thereof; a thymine at a position corresponding to position 545 according to SEQ ID NO:74, or the complement thereof; a thymine at a position corresponding to position 598 according to SEQ ID NO:75, or the complement thereof; a thymine at a position corresponding to position 545 according to SEQ ID NO:76, or the complement thereof; a thymine at a position corresponding to position 583 according to SEQ ID NO:77, or the complement thereof; a thymine at a position corresponding to position 943 according to SEQ ID NO:78, or the complement thereof; or a thymine at a position corresponding to position 405 according to SEQ ID NO:79, the complement thereof.

[0454] In some embodiments, the subject is identified as having: i) a genomic nucleic acid molecule having a nucleotide sequence encoding a WNT5B predicted loss-of-function polypeptide, wherein the nucleotide sequence comprises an adenine at a position corresponding to position 65,099 according to SEQ ID NO:5, or the complement thereof; ii) an mRNA molecule having a nucleotide sequence encoding a WNT5B predicted loss-of-function polypeptide, wherein the nucleotide sequence comprises: an adenine at a position corresponding to position 642 according to SEQ ID NO:37, or the complement thereof; an adenine at a position corresponding to position 545 according to SEQ ID NO:38, or the complement thereof; an adenine at a position corresponding to position 598 according to SEQ ID NO:39, or the complement thereof; an adenine at a position corresponding to position 545 according to SEQ ID NO:40, or the complement thereof; an adenine at a position corresponding to position 583 according to SEQ ID NO:41, or the complement thereof; an adenine at a position corresponding to position 943 according to SEQ ID NO:42, or the complement thereof; or an adenine at a position corresponding to position 405 according to SEQ ID NO:43, the complement thereof; or iii) a cDNA molecule having a nucleotide sequence encoding a WNT5B predicted loss-of-function polypeptide, wherein the nucleotide sequence comprises: an adenine at a position corresponding to position 642 according to SEQ ID NO:80, or the complement thereof; an adenine at a position corresponding to position 545 according to SEQ ID NO:81, or the complement thereof; an adenine at a position corresponding to position 598 according to SEQ ID NO:82, or the complement thereof; an adenine at a position corresponding to position 545 according to SEQ ID NO:83, or the complement thereof; an adenine at a position corresponding to position 583 according to SEQ ID NO:84, or the complement thereof; an adenine at a position corresponding to position 943 according to SEQ ID NO:85, or the complement thereof; or an adenine at a position corresponding to position 405 according to SEQ ID NO:86, or the complement thereof.

[0455] In some embodiments, the subject is identified as having a genomic nucleic acid molecule having a nucleotide sequence encoding a WNT5B predicted loss-of-function polypeptide, wherein the nucleotide sequence comprises an adenine at a position corresponding to position 65,099 according to SEQ ID NO:5, or the complement thereof.

[0456] In some embodiments, the subject is identified as having an mRNA molecule having a nucleotide sequence encoding a WNT5B predicted loss-of-function polypeptide, wherein the nucleotide sequence comprises: an adenine at a position corresponding to position 642 according to SEQ ID NO:37, or the complement thereof; an adenine at a position corresponding to position 545 according to SEQ ID NO:38, or the complement thereof; an adenine at a position corresponding to position 598 according to SEQ ID NO:39, or the complement thereof; an adenine at a position corresponding to position 545 according to SEQ ID NO:40, or the complement thereof; an adenine at a position corresponding to position 583 according to SEQ ID NO:41, or the complement thereof; an adenine at a position corresponding to position 943 according to SEQ ID NO:42, or the complement thereof; or an adenine at a position corresponding to position 405 according to SEQ ID NO:43, or the complement thereof.

[0457] In some embodiments, the subject is identified as having a cDNA molecule having a nucleotide sequence encoding a WNT5B predicted loss-of-function polypeptide, wherein the nucleotide sequence comprises: an adenine at a position corresponding to position 642 according to SEQ ID NO:80, or the complement thereof; an adenine at a position corresponding to position 545 according to SEQ ID NO:81, or the complement thereof; an adenine at a position corresponding to position 598 according to SEQ ID NO:82, or the complement thereof; an adenine at a position corresponding to position 545 according to SEQ ID NO:83, or the complement thereof; an adenine at a position corresponding to position 583 according to SEQ ID NO:84, or the complement thereof; an adenine at a position corresponding to position 943 according to SEQ ID NO:85, or the complement thereof; or an adenine at a position corresponding to position 405 according to SEQ ID NO:86, or the complement thereof.

[0458] In some embodiments, the subject is identified as having: i) a genomic nucleic acid molecule having a nucleotide sequence encoding a WNT5B predicted loss-of-function polypeptide, wherein the nucleotide sequence comprises a deletion of a TC dinucleotide at positions corresponding to positions 71,313-71,314 according to SEQ ID NO:6, or the complement thereof; ii) an mRNA molecule having a nucleotide sequence encoding a WNT5B predicted loss-of-function polypeptide, wherein the nucleotide sequence comprises: a deletion of a UC dinucleotide at positions corresponding to positions 1,039-1,040 according to SEQ ID NO:44, or the complement thereof; a deletion of a UC dinucleotide at positions corresponding to positions 942-943 according to SEQ ID NO:45, or the complement thereof; a deletion of a UC dinucleotide at positions corresponding to positions 995-996 according to SEQ ID NO:46, or the complement thereof; a deletion of a UC dinucleotide at positions corresponding to positions 942-943 according to SEQ ID NO:47, or the complement thereof; a deletion of a UC dinucleotide at positions corresponding to positions 980-981 according to SEQ ID NO:48, or the complement thereof; or a deletion of a UC dinucleotide at positions corresponding to positions 802-803 according to SEQ ID NO:49, or the complement thereof; or iii) a cDNA molecule having a nucleotide sequence encoding a WNT5B predicted loss-of-function polypeptide, wherein the nucleotide sequence comprises: a deletion of a TC dinucleotide at positions corresponding to positions 1,039-1,040 according to SEQ ID NO:87, or the complement thereof; a deletion of a TC dinucleotide at positions corresponding to positions 942-943 according to SEQ ID NO:88, or the complement thereof; a deletion of a TC dinucleotide at positions corresponding to positions 995-996 according to SEQ ID NO:89, or the complement thereof; a deletion of a TC dinucleotide at positions corresponding to positions 942-943 according to SEQ ID NO:90, or the complement thereof; a deletion of a TC dinucleotide at positions corresponding to positions 980-981 according to SEQ ID NO:91, or the complement thereof; or a deletion of a TC dinucleotide at positions corresponding to positions 802-803 according to SEQ ID NO:92, or the complement thereof.

[0459] In some embodiments, the subject is identified as having a genomic nucleic acid molecule having a nucleotide sequence encoding a WNT5B predicted loss-of-function polypeptide, wherein the nucleotide sequence comprises a deletion of a TC dinucleotide at positions corresponding to positions 71,313-71,314 according to SEQ ID NO:6, or the complement thereof.

[0460] In some embodiments, the subject is identified as having an mRNA molecule having a nucleotide sequence encoding a WNT5B predicted loss-of-function polypeptide, wherein the nucleotide sequence comprises: a deletion of a UC dinucleotide at positions corresponding to positions 1,039-1,040 according to SEQ ID NO:44, or the complement thereof; a deletion of a UC dinucleotide at positions corresponding to positions 942-943 according to SEQ ID NO:45, or the complement thereof; a deletion of a UC dinucleotide at positions corresponding to positions 995-996 according to SEQ ID NO:46, or the complement thereof; a deletion of a UC dinucleotide at positions corresponding to positions 942-943 according to SEQ ID NO:47, or the complement thereof; a deletion of a UC dinucleotide at positions corresponding to positions 980-981 according to SEQ ID NO:48, or the complement thereof; or a deletion of a UC dinucleotide at positions corresponding to positions 802-803 according to SEQ ID NO:49, or the complement thereof.

[0461] In some embodiments, the subject is identified as having a cDNA molecule having a nucleotide sequence encoding a WNT5B predicted loss-of-function polypeptide, wherein the nucleotide sequence comprises: a deletion of a TC dinucleotide at positions corresponding to positions 1,039-1,040 according to SEQ ID NO:87, or the complement thereof; a deletion of a TC dinucleotide at positions corresponding to positions 942-943 according to SEQ ID NO:88, or the complement thereof; a deletion of a TC dinucleotide at positions corresponding to positions 995-996 according to SEQ ID NO:89, or the complement thereof; a deletion of a TC dinucleotide at positions corresponding to positions 942-943 according to SEQ ID NO:90, or the complement thereof; a deletion of a TC dinucleotide at positions corresponding to positions 980-981 according to SEQ ID NO:91, or the complement thereof; or a deletion of a TC dinucleotide at positions corresponding to positions 802-803 according to SEQ ID NO:92, or the complement thereof.

[0462] In some embodiments, the subject is identified as having: a WNT5B predicted loss-of-function polypeptide that comprises: a stop codon at a position corresponding to position 83 according to SEQ ID NO:96, a stop codon at a position corresponding to position 83 according to SEQ ID NO:97, or a stop codon at a position corresponding to position 114 according to SEQ ID NO:98.

[0463] In some embodiments, the subject is identified as having: a WNT5B predicted loss-of-function polypeptide that comprises a cysteine at a position corresponding to position 134 according to SEQ ID NO:99, or a cysteine at a position corresponding to position 134 according to SEQ ID NO:100.

[0464] In some embodiments, the subject is identified as having: a WNT5B predicted loss-of-function polypeptide that comprises: a cysteine at a position corresponding to position 134 according to SEQ ID NO:101, or a cysteine at a position corresponding to position 134 according to SEQ ID NO:102.

[0465] In some embodiments, the subject is identified as having: a WNT5B predicted loss-of-function polypeptide that comprises a frameshift mutation at a position corresponding to position 266 according to SEQ ID NO:103.

[0466] The present disclosure also provides WNT5B inhibitors for use in the treatment or prevention of decreased bone mineral density in a subject, wherein the subject is heterozygous for any of the WNT5B variant genomic nucleic acid molecules, variant mRNA molecules, and/or variant cDNA molecules encoding a WNT5B predicted loss-of-function polypeptide described herein, or wherein the subject is reference for a WNT5B genomic nucleic acid molecule, mRNA molecule, or cDNA molecule. The WNT5B inhibitors can be any of the WNT5B inhibitors described herein. The decreased bone mineral density can be osteopenia, Type I osteoporosis, Type II osteoporosis, or secondary osteoporosis.

[0467] The present disclosure also provides WNT5B inhibitors for use in the preparation of a medicament for treating or preventing decreased bone mineral density in a subject, wherein the subject is heterozygous for any of the WNT5B variant genomic nucleic acid molecules, variant mRNA molecules, and/or variant cDNA molecules encoding a WNT5B predicted loss-of-function polypeptide described herein, or wherein the subject is reference for a WNT5B genomic nucleic acid molecule, mRNA molecule, or cDNA molecule. The WNT5B inhibitors can be any of the WNT5B inhibitors described herein. The decreased bone mineral density can be osteopenia, Type I osteoporosis, Type II osteoporosis, or secondary osteoporosis.

[0468] In some embodiments, the subject is reference for a WNT5B genomic nucleic acid molecule, a WNT5B mRNA molecule, or a WNT5B cDNA molecule. In some embodiments, the subject is reference for a WNT5B genomic nucleic acid molecule. In some embodiments, the subject is reference for a WNT5B mRNA molecule. In some embodiments, the subject is reference for a WNT5B cDNA molecule.

[0469] In some embodiments, the subject is identified as being heterozygous for a genomic nucleic acid molecule encoding a WNT5B predicted loss-of-function polypeptide, wherein the genomic nucleic acid molecule has a nucleotide sequence comprising: a thymine at a position corresponding to position 56,698 according to SEQ ID NO:2, or the complement thereof; an adenine at a position corresponding to position 58,170 according to SEQ ID NO:3, or the complement thereof; a thymine at a position corresponding to position 65,099 according to SEQ ID NO:4, or the complement thereof; an adenine at a position corresponding to position 65,099 according to SEQ ID NO:5, or the complement thereof; or a deletion of a TC dinucleotide at positions corresponding to positions 71,313-71,314 according to SEQ ID NO:6, or the complement thereof.

[0470] In some embodiments, the subject is identified as being heterozygous for an mRNA molecule encoding a WNT5B predicted loss-of-function polypeptide, wherein the mRNA molecule has a nucleotide sequence comprising: a uracil at a position corresponding to position 242 according to SEQ ID NO:15, or the complement thereof; a uracil at a position corresponding to position 145 according to SEQ ID NO:16, or the complement thereof; a uracil at a position corresponding to position 198 according to SEQ ID NO:17, or the complement thereof; a uracil at a position corresponding to position 40 according to SEQ ID NO:18, or the complement thereof; a uracil at a position corresponding to position 145 according to SEQ ID NO:19, or the complement thereof; a uracil at a position corresponding to position 183 according to SEQ ID NO:20, or the complement thereof; a uracil at a position corresponding to position 543 according to SEQ ID NO:21, or the complement thereof; an adenine at a position corresponding to position 491 according to SEQ ID NO:22, or the complement thereof; an adenine at a position corresponding to position 394 according to SEQ ID NO:23, or the complement thereof; an adenine at a position corresponding to position 447 according to SEQ ID NO:24, or the complement thereof; an adenine at a position corresponding to position 289 according to SEQ ID NO:25, or the complement thereof; an adenine at a position corresponding to position 394 according to SEQ ID NO:26, or the complement thereof; an adenine at a position corresponding to position 432 according to SEQ ID NO:27, or the complement thereof; an adenine at a position corresponding to position 792 according to SEQ ID NO:28, or the complement thereof; an adenine at a position corresponding to position 254 according to SEQ ID NO:29, or the complement thereof; a uracil at a position corresponding to position 642 according to SEQ ID NO:30, or the complement thereof; a uracil at a position corresponding to position 545 according to SEQ ID NO:31, or the complement thereof; a uracil at a position corresponding to position 598 according to SEQ ID NO:32, or the complement thereof; a uracil at a position corresponding to position 545 according to SEQ ID NO:33, or the complement thereof; a uracil at a position corresponding to position 583 according to SEQ ID NO:34, or the complement thereof; a uracil at a position corresponding to position 943 according to SEQ ID NO:35, or the complement thereof; a uracil at a position corresponding to position 405 according to SEQ ID NO:36, or the complement thereof; an adenine at a position corresponding to position 642 according to SEQ ID NO:37, or the complement thereof; an adenine at a position corresponding to position 545 according to SEQ ID NO:38, or the complement thereof; an adenine at a position corresponding to position 598 according to SEQ ID NO:39, or the complement thereof; an adenine at a position corresponding to position 545 according to SEQ ID NO:40, or the complement thereof; an adenine at a position corresponding to position 583 according to SEQ ID NO:41, or the complement thereof; an adenine at a position corresponding to position 943 according to SEQ ID NO:42, or the complement thereof; an adenine at a position corresponding to position 405 according to SEQ ID NO:43, or the complement thereof; a deletion of a UC dinucleotide at positions corresponding to positions 1,039-1,040 according to SEQ ID NO:44, or the complement thereof; a deletion of a UC dinucleotide at positions corresponding to positions 942-943 according to SEQ ID NO:45, or the complement thereof; a deletion of a UC dinucleotide at positions corresponding to positions 995-996 according to SEQ ID NO:46, or the complement thereof; a deletion of a UC dinucleotide at positions corresponding to positions 942-943 according to SEQ ID NO:47, or the complement thereof; a deletion of a UC dinucleotide at positions corresponding to positions 980-981 according to SEQ ID NO:48, or the complement thereof; or a deletion of a UC dinucleotide at positions corresponding to positions 802-803 according to SEQ ID NO:49, or the complement thereof.

[0471] In some embodiments, the subject is identified as being heterozygous for a cDNA molecule encoding a WNT5B predicted loss-of-function polypeptide, wherein the cDNA molecule has a nucleotide sequence comprising: a thymine at a position corresponding to position 242 according to SEQ ID NO:58, or the complement thereof; a thymine at a position corresponding to position 145 according to SEQ ID NO:59, or the complement thereof; a thymine at a position corresponding to position 198 according to SEQ ID NO:60, or the complement thereof; a thymine at a position corresponding to position 40 according to SEQ ID NO:61, or the complement thereof; a thymine at a position corresponding to position 145 according to SEQ ID NO:62, or the complement thereof; a thymine at a position corresponding to position 183 according to SEQ ID NO:63, or the complement thereof; a thymine at a position corresponding to position 543 according to SEQ ID NO:64, or the complement thereof; an adenine at a position corresponding to position 491 according to SEQ ID NO:65, or the complement thereof; an adenine at a position corresponding to position 394 according to SEQ ID NO:66, or the complement thereof; an adenine at a position corresponding to position 447 according to SEQ ID NO:67, or the complement thereof; an adenine at a position corresponding to position 289 according to SEQ ID NO:68, or the complement thereof; an adenine at a position corresponding to position 394 according to SEQ ID NO:69, or the complement thereof; an adenine at a position corresponding to position 432 according to SEQ ID NO:70, or the complement thereof; an adenine at a position corresponding to position 792 according to SEQ ID NO:71, or the complement thereof; an adenine at a position corresponding to position 254 according to SEQ ID NO:72, or the complement thereof; a thymine at a position corresponding to position 642 according to SEQ ID NO:73, or the complement thereof; a thymine at a position corresponding to position 545 according to SEQ ID NO:74, or the complement thereof; a thymine at a position corresponding to position 598 according to SEQ ID NO:75, or the complement thereof; a thymine at a position corresponding to position 545 according to SEQ ID NO:76, or the complement thereof; a thymine at a position corresponding to position 583 according to SEQ ID NO:77, or the complement thereof; a thymine at a position corresponding to position 943 according to SEQ ID NO:78, or the complement thereof; a thymine at a position corresponding to position 405 according to SEQ ID NO:79, or the complement thereof; an adenine at a position corresponding to position 642 according to SEQ ID NO:80, or the complement thereof; an adenine at a position corresponding to position 545 according to SEQ ID NO:81, or the complement thereof; an adenine at a position corresponding to position 598 according to SEQ ID NO:82, or the complement thereof; an adenine at a position corresponding to position 545 according to SEQ ID NO:83, or the complement thereof; an adenine at a position corresponding to position 583 according to SEQ ID NO:84, or the complement thereof; an adenine at a position corresponding to position 943 according to SEQ ID NO:85, or the complement thereof; an adenine at a position corresponding to position 405 according to SEQ ID NO:86, or the complement thereof; a deletion of a TC dinucleotide at positions corresponding to positions 1,039-1,040 according to SEQ ID NO:87, or the complement thereof; a deletion of a TC dinucleotide at positions corresponding to positions 942-943 according to SEQ ID NO:88, or the complement thereof; a deletion of a TC dinucleotide at positions corresponding to positions 995-996 according to SEQ ID NO:89, or the complement thereof; a deletion of a TC dinucleotide at positions corresponding to positions 942-943 according to SEQ ID NO:90, or the complement thereof; a deletion of a TC dinucleotide at positions corresponding to positions 980-981 according to SEQ ID NO:91, or the complement thereof; or a deletion of a TC dinucleotide at positions corresponding to positions 802-803 according to SEQ ID NO:92, or the complement thereof.

[0472] In some embodiments, the subject is identified as being heterozygous for: i) a genomic nucleic acid molecule having a nucleotide sequence encoding a WNT5B predicted loss-of-function polypeptide, wherein the nucleotide sequence comprises a thymine at a position corresponding to position 56,698 according to SEQ ID NO:2, or the complement thereof; ii) an mRNA molecule having a nucleotide sequence encoding a WNT5B predicted loss-of-function polypeptide, wherein the nucleotide sequence comprises: a uracil at a position corresponding to position 242 according to SEQ ID NO:15, or the complement thereof; a uracil at a position corresponding to position 145 according to SEQ ID NO:16, or the complement thereof; a uracil at a position corresponding to position 198 according to SEQ ID NO:17, or the complement thereof; a uracil at a position corresponding to position 40 according to SEQ ID NO:18, or the complement thereof; a uracil at a position corresponding to position 145 according to SEQ ID NO:19, or the complement thereof; a uracil at a position corresponding to position 183 according to SEQ ID NO:20, or the complement thereof; or a uracil at a position corresponding to position 543 according to SEQ ID NO:21, or the complement thereof; or iii) a cDNA molecule having a nucleotide sequence encoding a WNT5B predicted loss-of-function polypeptide, wherein the nucleotide sequence comprises: a thymine at a position corresponding to position 242 according to SEQ ID NO:58, or the complement thereof; a thymine at a position corresponding to position 145 according to SEQ ID NO:59, or the complement thereof; a thymine at a position corresponding to position 198 according to SEQ ID NO:60, or the complement thereof; a thymine at a position corresponding to position 40 according to SEQ ID NO:61, or the complement thereof; a thymine at a position corresponding to position 145 according to SEQ ID NO:62, or the complement thereof; a thymine at a position corresponding to position 183 according to SEQ ID NO:63, or the complement thereof; or a thymine at a position corresponding to position 543 according to SEQ ID NO:64, or the complement thereof.

[0473] In some embodiments, the subject is identified as being heterozygous for a genomic nucleic acid molecule having a nucleotide sequence encoding a WNT5B predicted loss-of-function polypeptide, wherein the nucleotide sequence comprises a thymine at a position corresponding to position 56,698 according to SEQ ID NO:2, or the complement thereof.

[0474] In some embodiments, the subject is identified as being heterozygous for an mRNA molecule having a nucleotide sequence encoding a WNT5B predicted loss-of-function polypeptide, wherein the nucleotide sequence comprises: a uracil at a position corresponding to position 242 according to SEQ ID NO:15, or the complement thereof; a uracil at a position corresponding to position 145 according to SEQ ID NO:16, or the complement thereof; a uracil at a position corresponding to position 198 according to SEQ ID NO:17, or the complement thereof; a uracil at a position corresponding to position 40 according to SEQ ID NO:18, or the complement thereof; a uracil at a position corresponding to position 145 according to SEQ ID NO:19, or the complement thereof; a uracil at a position corresponding to position 183 according to SEQ ID NO:20, or the complement thereof; or a uracil at a position corresponding to position 543 according to SEQ ID NO:21, or the complement thereof.

[0475] In some embodiments, the subject is identified as being heterozygous for a cDNA molecule having a nucleotide sequence encoding a WNT5B predicted loss-of-function polypeptide, wherein the nucleotide sequence comprises: a thymine at a position corresponding to position 242 according to SEQ ID NO:58, or the complement thereof; a thymine at a position corresponding to position 145 according to SEQ ID NO:59, or the complement thereof; a thymine at a position corresponding to position 198 according to SEQ ID NO:60, or the complement thereof; a thymine at a position corresponding to position 40 according to SEQ ID NO:61, or the complement thereof; a thymine at a position corresponding to position 145 according to SEQ ID NO:62, or the complement thereof; a thymine at a position corresponding to position 183 according to SEQ ID NO:63, or the complement thereof; or a thymine at a position corresponding to position 543 according to SEQ ID NO:64, or the complement thereof.

[0476] In some embodiments, the subject is identified as being heterozygous for: i) a genomic nucleic acid molecule having a nucleotide sequence encoding a WNT5B predicted loss-of-function polypeptide, wherein the nucleotide sequence comprises an adenine at a position corresponding to position 58,170 according to SEQ ID NO:3, or the complement thereof; ii) an mRNA molecule having a nucleotide sequence encoding a WNT5B predicted loss-of-function polypeptide, wherein the nucleotide sequence comprises: an adenine at a position corresponding to position 491 according to SEQ ID NO:22, or the complement thereof; an adenine at a position corresponding to position 394 according to SEQ ID NO:23, or the complement thereof; an adenine at a position corresponding to position 447 according to SEQ ID NO:24, or the complement thereof; an adenine at a position corresponding to position 289 according to SEQ ID NO:25, or the complement thereof; an adenine at a position corresponding to position 394 according to SEQ ID NO:26, or the complement thereof; an adenine at a position corresponding to position 432 according to SEQ ID NO:27, or the complement thereof; an adenine at a position corresponding to position 792 according to SEQ ID NO:28, or the complement thereof; or an adenine at a position corresponding to position 254 according to SEQ ID NO:29, or the complement thereof; or iii) a cDNA molecule having a nucleotide sequence encoding a WNT5B predicted loss-of-function polypeptide, wherein the nucleotide sequence comprises: an adenine at a position corresponding to position 491 according to SEQ ID NO:65, or the complement thereof; an adenine at a position corresponding to position 394 according to SEQ ID NO:66, or the complement thereof; an adenine at a position corresponding to position 447 according to SEQ ID NO:67, or the complement thereof; an adenine at a position corresponding to position 289 according to SEQ ID NO:68, or the complement thereof; an adenine at a position corresponding to position 394 according to SEQ ID NO:69, or the complement thereof; an adenine at a position corresponding to position 432 according to SEQ ID NO:70, or the complement thereof; an adenine at a position corresponding to position 792 according to SEQ ID NO:71, or the complement thereof; or an adenine at a position corresponding to position 254 according to SEQ ID NO:72, or the complement thereof.

[0477] In some embodiments, the subject is identified as being heterozygous for a genomic nucleic acid molecule having a nucleotide sequence encoding a WNT5B predicted loss-of-function polypeptide, wherein the nucleotide sequence comprises an adenine at a position corresponding to position 58,170 according to SEQ ID NO:3, or the complement thereof.

[0478] In some embodiments, the subject is identified as being heterozygous for an mRNA molecule having a nucleotide sequence encoding a WNT5B predicted loss-of-function polypeptide, wherein the nucleotide sequence comprises: an adenine at a position corresponding to position 491 according to SEQ ID NO:22, or the complement thereof; an adenine at a position corresponding to position 394 according to SEQ ID NO:23, or the complement thereof; an adenine at a position corresponding to position 447 according to SEQ ID NO:24, or the complement thereof; an adenine at a position corresponding to position 289 according to SEQ ID NO:25, or the complement thereof; an adenine at a position corresponding to position 394 according to SEQ ID NO:26, or the complement thereof; an adenine at a position corresponding to position 432 according to SEQ ID NO:27, or the complement thereof; an adenine at a position corresponding to position 792 according to SEQ ID NO:28, or the complement thereof; or an adenine at a position corresponding to position 254 according to SEQ ID NO:29, or the complement thereof.

[0479] In some embodiments, the subject is identified as being heterozygous for a cDNA molecule having a nucleotide sequence encoding a WNT5B predicted loss-of-function polypeptide, wherein the nucleotide sequence comprises: an adenine at a position corresponding to position 491 according to SEQ ID NO:65, or the complement thereof; an adenine at a position corresponding to position 394 according to SEQ ID NO:66, or the complement thereof; an adenine at a position corresponding to position 447 according to SEQ ID NO:67, or the complement thereof; an adenine at a position corresponding to position 289 according to SEQ ID NO:68, or the complement thereof; an adenine at a position corresponding to position 394 according to SEQ ID NO:69, or the complement thereof; an adenine at a position corresponding to position 432 according to SEQ ID NO:70, or the complement thereof; an adenine at a position corresponding to position 792 according to SEQ ID NO:71, or the complement thereof; or an adenine at a position corresponding to position 254 according to SEQ ID NO:72, or the complement thereof.

[0480] In some embodiments, the subject is identified as being heterozygous for: i) a genomic nucleic acid molecule having a nucleotide sequence encoding a WNT5B predicted loss-of-function polypeptide, wherein the nucleotide sequence comprises a thymine at a position corresponding to position 65,099 according to SEQ ID NO:4, or the complement thereof; ii) an mRNA molecule having a nucleotide sequence encoding a WNT5B predicted loss-of-function polypeptide, wherein the nucleotide sequence comprises: a uracil at a position corresponding to position 642 according to SEQ ID NO:30, or the complement thereof; a uracil at a position corresponding to position 545 according to SEQ ID NO:31, or the complement thereof; a uracil at a position corresponding to position 598 according to SEQ ID NO:32, or the complement thereof; a uracil at a position corresponding to position 545 according to SEQ ID NO:33, or the complement thereof; a uracil at a position corresponding to position 583 according to SEQ ID NO:34, or the complement thereof; a uracil at a position corresponding to position 943 according to SEQ ID NO:35, or the complement thereof; or a uracil at a position corresponding to position 405 according to SEQ ID NO:36, or the complement thereof; or iii) a cDNA molecule having a nucleotide sequence encoding a WNT5B predicted loss-of-function polypeptide, wherein the nucleotide sequence comprises: a thymine at a position corresponding to position 642 according to SEQ ID NO:73, or the complement thereof; a thymine at a position corresponding to position 545 according to SEQ ID NO:74, or the complement thereof; a thymine at a position corresponding to position 598 according to SEQ ID NO:75, or the complement thereof; a thymine at a position corresponding to position 545 according to SEQ ID NO:76, or the complement thereof; a thymine at a position corresponding to position 583 according to SEQ ID NO:77, or the complement thereof; a thymine at a position corresponding to position 943 according to SEQ ID NO:78, or the complement thereof; or a thymine at a position corresponding to position 405 according to SEQ ID NO:79, or the complement thereof.

[0481] In some embodiments, the subject is identified as being heterozygous for a genomic nucleic acid molecule having a nucleotide sequence encoding a WNT5B predicted loss-of-function polypeptide, wherein the nucleotide sequence comprises a thymine at a position corresponding to position 65,099 according to SEQ ID NO:4, or the complement thereof.

[0482] In some embodiments, the subject is identified as being heterozygous for an mRNA molecule having a nucleotide sequence encoding a WNT5B predicted loss-of-function polypeptide, wherein the nucleotide sequence comprises: a uracil at a position corresponding to position 642 according to SEQ ID NO:30, or the complement thereof; a uracil at a position corresponding to position 545 according to SEQ ID NO:31, or the complement thereof; a uracil at a position corresponding to position 598 according to SEQ ID NO:32, or the complement thereof; a uracil at a position corresponding to position 545 according to SEQ ID NO:33, or the complement thereof; a uracil at a position corresponding to position 583 according to SEQ ID NO:34, or the complement thereof; a uracil at a position corresponding to position 943 according to SEQ ID NO:35, or the complement thereof; or a uracil at a position corresponding to position 405 according to SEQ ID NO:36, or the complement thereof.

[0483] In some embodiments, the subject is identified as being heterozygous for a cDNA molecule having a nucleotide sequence encoding a WNT5B predicted loss-of-function polypeptide, wherein the nucleotide sequence comprises: a thymine at a position corresponding to position 642 according to SEQ ID NO:73, or the complement thereof; a thymine at a position corresponding to position 545 according to SEQ ID NO:74, or the complement thereof; a thymine at a position corresponding to position 598 according to SEQ ID NO:75, or the complement thereof; a thymine at a position corresponding to position 545 according to SEQ ID NO:76, or the complement thereof; a thymine at a position corresponding to position 583 according to SEQ ID NO:77, or the complement thereof; a thymine at a position corresponding to position 943 according to SEQ ID NO:78, or the complement thereof; or a thymine at a position corresponding to position 405 according to SEQ ID NO:79, or the complement thereof.

[0484] In some embodiments, the subject is identified as being heterozygous for: i) a genomic nucleic acid molecule having a nucleotide sequence encoding a WNT5B predicted loss-of-function polypeptide, wherein the nucleotide sequence comprises an adenine at a position corresponding to position 65,099 according to SEQ ID NO:5, or the complement thereof; ii) an mRNA molecule having a nucleotide sequence encoding a WNT5B predicted loss-of-function polypeptide, wherein the nucleotide sequence comprises: an adenine at a position corresponding to position 642 according to SEQ ID NO:37, or the complement thereof; an adenine at a position corresponding to position 545 according to SEQ ID NO:38, or the complement thereof; an adenine at a position corresponding to position 598 according to SEQ ID NO:39, or the complement thereof; an adenine at a position corresponding to position 545 according to SEQ ID NO:40, or the complement thereof; an adenine at a position corresponding to position 583 according to SEQ ID NO:41, or the complement thereof; an adenine at a position corresponding to position 943 according to SEQ ID NO:42, or the complement thereof; or an adenine at a position corresponding to position 405 according to SEQ ID NO:43, or the complement thereof; or iii) a cDNA molecule having a nucleotide sequence encoding a WNT5B predicted loss-of-function polypeptide, wherein the nucleotide sequence comprises: an adenine at a position corresponding to position 642 according to SEQ ID NO:80, or the complement thereof; an adenine at a position corresponding to position 545 according to SEQ ID NO:81, or the complement thereof; an adenine at a position corresponding to position 598 according to SEQ ID NO:82, or the complement thereof; an adenine at a position corresponding to position 545 according to SEQ ID NO:83, or the complement thereof; an adenine at a position corresponding to position 583 according to SEQ ID NO:84, or the complement thereof; an adenine at a position corresponding to position 943 according to SEQ ID NO:85, or the complement thereof; or an adenine at a position corresponding to position 405 according to SEQ ID NO:86, or the complement thereof.

[0485] In some embodiments, the subject is identified as being heterozygous for a genomic nucleic acid molecule having a nucleotide sequence encoding a WNT5B predicted loss-of-function polypeptide, wherein the nucleotide sequence comprises an adenine at a position corresponding to position 65,099 according to SEQ ID NO:5, or the complement thereof.

[0486] In some embodiments, the subject is identified as being heterozygous for an mRNA molecule having a nucleotide sequence encoding a WNT5B predicted loss-of-function polypeptide, wherein the nucleotide sequence comprises: an adenine at a position corresponding to position 642 according to SEQ ID NO:37, or the complement thereof; an adenine at a position corresponding to position 545 according to SEQ ID NO:38, or the complement thereof; an adenine at a position corresponding to position 598 according to SEQ ID NO:39, or the complement thereof; an adenine at a position corresponding to position 545 according to SEQ ID NO:40, or the complement thereof; an adenine at a position corresponding to position 583 according to SEQ ID NO:41, or the complement thereof; an adenine at a position corresponding to position 943 according to SEQ ID NO:42, or the complement thereof; or an adenine at a position corresponding to position 405 according to SEQ ID NO:43, or the complement thereof.

[0487] In some embodiments, the subject is identified as being heterozygous for a cDNA molecule having a nucleotide sequence encoding a WNT5B predicted loss-of-function polypeptide, wherein the nucleotide sequence comprises: an adenine at a position corresponding to position 642 according to SEQ ID NO:80, or the complement thereof; an adenine at a position corresponding to position 545 according to SEQ ID NO:81, or the complement thereof; an adenine at a position corresponding to position 598 according to SEQ ID NO:82, or the complement thereof; an adenine at a position corresponding to position 545 according to SEQ ID NO:83, or the complement thereof; an adenine at a position corresponding to position 583 according to SEQ ID NO:84, or the complement thereof; an adenine at a position corresponding to position 943 according to SEQ ID NO:85, or the complement thereof; or an adenine at a position corresponding to position 405 according to SEQ ID NO:86, or the complement thereof.

[0488] In some embodiments, the subject is identified as being heterozygous for: i) a genomic nucleic acid molecule having a nucleotide sequence encoding a WNT5B predicted loss-of-function polypeptide, wherein the nucleotide sequence comprises a deletion of a TC dinucleotide at positions corresponding to positions 71,313-71,314 according to SEQ ID NO:6, or the complement thereof; ii) an mRNA molecule having a nucleotide sequence encoding a WNT5B predicted loss-of-function polypeptide, wherein the nucleotide sequence comprises: a deletion of a UC dinucleotide at positions corresponding to positions 1,039-1,040 according to SEQ ID NO:44, or the complement thereof; a deletion of a UC dinucleotide at positions corresponding to positions 942-943 according to SEQ ID NO:45, or the complement thereof; a deletion of a UC dinucleotide at positions corresponding to positions 995-996 according to SEQ ID NO:46, or the complement thereof; a deletion of a UC dinucleotide at positions corresponding to positions 942-943 according to SEQ ID NO:47, or the complement thereof; a deletion of a UC dinucleotide at positions corresponding to positions 980-981 according to SEQ ID NO:48, or the complement thereof; or a deletion of a UC dinucleotide at positions corresponding to positions 802-803 according to SEQ ID NO:49, or the complement thereof; or iii) a cDNA molecule having a nucleotide sequence encoding a WNT5B predicted loss-of-function polypeptide, wherein the nucleotide sequence comprises: a deletion of a TC dinucleotide at positions corresponding to positions 1,039-1,040 according to SEQ ID NO:87, or the complement thereof; a deletion of a TC dinucleotide at positions corresponding to positions 942-943 according to SEQ ID NO:88, or the complement thereof; a deletion of a TC dinucleotide at positions corresponding to positions 995-996 according to SEQ ID NO:89, or the complement thereof; a deletion of a TC dinucleotide at positions corresponding to positions 942-943 according to SEQ ID NO:90, or the complement thereof; a deletion of a TC dinucleotide at positions corresponding to positions 980-981 according to SEQ ID NO:91, or the complement thereof; or a deletion of a TC dinucleotide at positions corresponding to positions 802-803 according to SEQ ID NO:92, or the complement thereof.

[0489] In some embodiments, the subject is identified as being heterozygous for a genomic nucleic acid molecule having a nucleotide sequence encoding a WNT5B predicted loss-of-function polypeptide, wherein the nucleotide sequence comprises a deletion of a TC dinucleotide at positions corresponding to positions 71,313-71,314 according to SEQ ID NO:6, or the complement thereof.

[0490] In some embodiments, the subject is identified as being heterozygous for an mRNA molecule having a nucleotide sequence encoding a WNT5B predicted loss-of-function polypeptide, wherein the nucleotide sequence comprises: a deletion of a UC dinucleotide at positions corresponding to positions 1,039-1,040 according to SEQ ID NO:44, or the complement thereof; a deletion of a UC dinucleotide at positions corresponding to positions 942-943 according to SEQ ID NO:45, or the complement thereof; a deletion of a UC dinucleotide at positions corresponding to positions 995-996 according to SEQ ID NO:46, or the complement thereof; a deletion of a UC dinucleotide at positions corresponding to positions 942-943 according to SEQ ID NO:47, or the complement thereof; a deletion of a UC dinucleotide at positions corresponding to positions 980-981 according to SEQ ID NO:48, or the complement thereof; or a deletion of a UC dinucleotide at positions corresponding to positions 802-803 according to SEQ ID NO:49, or the complement thereof.

[0491] In some embodiments, the subject is identified as being heterozygous for a cDNA molecule having a nucleotide sequence encoding a WNT5B predicted loss-of-function polypeptide, wherein the nucleotide sequence comprises: a deletion of a TC dinucleotide at positions corresponding to positions 1,039-1,040 according to SEQ ID NO:87, or the complement thereof; a deletion of a TC dinucleotide at positions corresponding to positions 942-943 according to SEQ ID NO:88, or the complement thereof; a deletion of a TC dinucleotide at positions corresponding to positions 995-996 according to SEQ ID NO:89, or the complement thereof; a deletion of a TC dinucleotide at positions corresponding to positions 942-943 according to SEQ ID NO:90, or the complement thereof; a deletion of a TC dinucleotide at positions corresponding to positions 980-981 according to SEQ ID NO:91, or the complement thereof; or a deletion of a TC dinucleotide at positions corresponding to positions 802-803 according to SEQ ID NO:92, or the complement thereof.

[0492] All patent documents, websites, other publications, accession numbers and the like cited above or below are incorporated by reference in their entirety for all purposes to the same extent as if each individual item were specifically and individually indicated to be so incorporated by reference. If different versions of a sequence are associated with an accession number at different times, the version associated with the accession number at the effective filing date of this application is meant. The effective filing date means the earlier of the actual filing date or filing date of a priority application referring to the accession number if applicable. Likewise, if different versions of a publication, website or the like are published at different times, the version most recently published at the effective filing date of the application is meant unless otherwise indicated. Any feature, step, element, embodiment, or aspect of the present disclosure can be used in combination with any other feature, step, element, embodiment, or aspect unless specifically indicated otherwise. Although the present disclosure has been described in some detail by way of illustration and example for purposes of clarity and understanding, it will be apparent that certain changes and modifications may be practiced within the scope of the appended claims.

[0493] The following examples are provided to describe the embodiments in greater detail. They are intended to illustrate, not to limit, the claimed embodiments. The following examples provide those of ordinary skill in the art with a disclosure and description of how the compounds, compositions, articles, devices and/or methods described herein are made and evaluated, and are intended to be purely exemplary and are not intended to limit the scope of any claims. Efforts have been made to ensure accuracy with respect to numbers (such as, for example, amounts, temperature, etc.), but some errors and deviations may be accounted for. Unless indicated otherwise, parts are parts by weight, temperature is in ° C. or is at ambient temperature, and pressure is at or near atmospheric.

### EXAMPLES

### Example 1: General Methodology

### Cohort Descriptions

[0494] The United Kingdom (UK) Biobank (UKB) is a population-based cohort of individuals aged between 40 to 69 years at baseline and recruited via 22 testing centers in the UK between 2006-2010 (Bycroft et al., Nature, 2018, 562, 203-209). Genetic and phenotypic data from close to 431,000 European-ancestry participants in UKB was used. Fracture analyses were performed in European-ancestry individuals, using data from UKB, and up to four further cohorts (GHS, Sinai, PMBB, and MDCS). The MyCode Community Health Initiative cohort from the Geisinger Health System (GHS) (Carey et al., Genet. Med., 2016, 18, 906-913) is a health system-based cohort of patients from Central and Eastern Pennsylvania (USA) recruited in 2007-2019. The Mount Sinai BioMe cohort (Sinai) is a health system-based cohort based in New York City (Abul-Husn et al., Genome Med., 2021, 13, 17). The University of Pennsylvania Medicine BioBank (PMBB) is a health system-based cohort based in Pennsylvania. The Malmo Diet and Cancer Study (MDCS) is a cohort study based in Malmo, Sweden (Berglund et al., J. Intern. Med., 1993, 233, 45-51). All studies were approved by relevant ethics committees and participants provided informed consent for participation in these studies. The number of cases and controls included in the fracture outcomes analyses are shown in FIG. 6.

### Phenotype Definition

[0495] Data pertaining to quantitative ultrasound of the heel were extracted from UKB. eBMD trait values (in g/cm²) were derived using a combination of speed of sound (SOS) and bone ultrasound attenuation (BUA; eBMD=0.002592×(BUA+SOS)−3.687). Sex-specific quality control measures were implemented for SOS (subjects were excluded if SOS≤1,450 or ≥1,700 m/s for men, ≤1,455 or ≥1,700 m/s for women), BUA (exclude if BUA≤27 or ≥138 dB/MHz for men, ≤22 or ≥138 dB/MHz for women), and eBMD (exclude if ≤0.18 or ≥1.06 g/cm² for men, ≤0.12 or ≥1.025 g/cm² for women). Phenotypic values for eBMD were first transformed using rank-based inverse normal transformation, applied within each ancestry group and separately in men and women, and adjusted for fine-mapped common (MAF>=0.01) genetic variants associated with eBMD. The definitions for the fracture outcomes are shown in FIG. 5.

### Genotype Data

[0496] High coverage whole exome sequencing was performed as previously described (Dewey et al., Science, 2016, 354, 6319:aaf6814; and Van Hout et al., Nature, 2020, 586, 749-756) and as summarized below. A modified version of the xGen design available from Integrated DNA Technologies (IDT) was used for target sequence capture of the exome. A unique 10 bp barcode (IDT) was added to each DNA fragment during library preparation to facilitate multiplexed exome capture and sequencing. Equal amounts of sample were pooled prior to exome capture. Sequencing was performed using 75 bp paired-end reads on Illumina NovaSeq instruments. Sequencing had a coverage depth (i.e., number of sequence-reads covering each nucleotide in the target areas of the genome) sufficient to provide greater than 20× coverage over 90% of targeted bases in 99% of IDT samples. Data processing steps included sample de-multiplexing using Illumina software, alignment to the GRCh38 Human Genome reference sequence including generation of binary alignment and mapping files (BAM), processing of BAM files (e.g., marking of duplicate reads and other read mapping evaluations). Variant calling was performed using the GLNexus system (Lin et al., bioRxiv, 2018, 343970). Variant mapping and annotation were based on the GRCh38 Human Genome reference sequence and Ensembl v85 gene definitions using the snpEff software. The snpEff predictions that involve protein-coding transcripts with an annotated start and stop were then combined into a single functional impact prediction by selecting the most deleterious functional effect class for each gene. The hierarchy (from most to least deleterious) for these annotations was frameshift, stop-gain, stop-loss, splice acceptor, splice donor, stop-lost, in-frame indel, missense, other annotations. Predicted LoF genetic variants included: a) insertions or deletions resulting in a frameshift, b) insertions, deletions or single nucleotide variants resulting in the introduction of a premature stop codon or in the loss of the transcription start site or stop site, and c) variants in donor or acceptor splice sites. Variants were classified for likely functional impact according to the number of in silico prediction algorithms that predicted deleteriousness using SIFT (Vaser et al., Nature Protocols, 2016, 11, 1-9), Polyphen2_HDIV and Polyphen2_HVAR (Adzhubei et al., Nat. Methods, 2010, 7, 248-249), LRT (Chun et al., Genome Res., 2009, 19, 1553-1561) and MutationTaster (Schwarz et al., Nat. Methods, 2010, 7, 575-576). For each gene, the alternative allele frequency (AAF) and functional annotation of each variant determined inclusion into 7 gene burden exposures: 1) pLoF variants with AAF<1%; 2) pLoF or variants predicted deleterious by 5/5 algorithms with AAF<1%; 3) pLoF or variants predicted deleterious by 5/5 algorithms with AAF<0.1%; 4) pLoF or variants predicted deleterious by at least 1/5 algorithms with AAF<1%; 5) pLoF or variants predicted deleterious by at least 1/5 algorithms with AAF<0.1%; 6) pLoF or any missense with AAF<1%; 7) pLoF or any variants with AAF<0.1%. The results described elsewhere in this document as pertaining to “pLoF or predicted deleterious variants” refer to analysis performed using the aggregate burden of pLoF variants or variants predicted to by deleterious by 5/5 algorithms.

Association Analysis of Gene Burden of Rare pLoF and Missense Variation in WNT5B

[0497] An association between the burden of rare pLoF or variants in a given gene and phenotype was examined by fitting a linear (for eBMD) or firth bias-corrected logistic (for fracture outcomes) regression model adjusted for a polygenic adjustment for a polygenic score that approximates a genomic kinship matrix, using REGENIE v1.0 (Mbatchou et al., Nature Genetics, 2021). Analyses were adjusted for age, age², sex, age-by-sex and age²-by-sex interaction terms, experimental batch-related covariates, ten common variant-derived principal components, and twenty rare variant-derived principal components. Association analyses were performed using single variants, and using gene burden tests. In gene burden tests, all individuals are labelled as heterozygotes if they carry one or more qualifying rare variant (as described above based on frequency and functional annotation) and as homozygotes if they carry any qualifying variant in the homozygous state. This “composite genotype” is then used to test for association.

Effector Index for eBMD Causal Genes

[0498] Effector Index, a novel machine-learning algorithm, was used (Forgetta et al., bioRxiv: 2021, 2020.2006.2028.171561). Training data were generated by performing GWAS analysis for eleven diseases and traits (type 2 diabetes, low density lipoprotein cholesterol level, adult height, calcium level, hypothyroidism, triglyceride level, glucose level, red blood cell count systolic blood pressure, diastolic blood pressure and direct bilirubin level). Fine-mapping was performed for each GWAS dataset, and genomic annotations were used as features to predict positive control genes at fine-mapped GWAS loci, using a gradient boosted trees algorithm (XGBoost). This trained algorithm was then tested on fine-mapped and annotated eBMD associations data at the WNT5B locus.

### Example 2: Loss-of-Function of WNT5B is Associated with Higher Estimated Bone Mineral Density

[0499] Whole exome sequencing of 419,737 European-ancestry individuals in the UK Biobank (UKB) was performed to identify protein-coding variants in each gene in the genome. The association of each sequenced gene and genetic variant was examined in UKB with estimated bone mineral density (eBMD, measured using ultrasound of the heel). eBMD is a commonly used biomarker of bone density and strength, and is highly correlated with bone mineral density as measured using dual-energy X-ray absorptiometry (DXA) technology. Lower levels of bone density are strongly associated with a higher risk of osteoporotic fractures.

[0500] The exome-wide analysis in UKB found that the burden of rare (alternative allele frequency [AAF]<1%) pLoF or predicted deleterious variants (with predicted deleteriousness based on agreement between five distinct algorithms) in the WNT5B gene was associated with 0.2 standard deviation units higher eBMD (P-value=9.4×10⁻¹⁰, meeting a Bonferroni-corrected, exome-wide statistical significance threshold of P<3.6×10⁻⁷ (correction for 20,000 genes and seven variant aggregation models at an alpha of 0.05)) (see, FIG. 1).

[0501] A nominally significant association was also observed between the aggregate burden of WNT5B pLoF variants only and higher eBMD (see, FIG. 2). The effect estimate for the burden of pLoF variants (0.24 SD or 0.029 g/cm² higher eBMD per WNT5B allele copy, as shown in FIG. 2) was very similar to the effect of the burden of pLoF or predicted deleterious variants (0.2 SD or 0.024 g/cm² higher eBMD per WNT5B allele copy, as shown in FIG. 1). This suggests that most of the variants included in the analysis likely result in WNT5B loss-of-function, and that the association with higher eBMD can be attributed to WNT5B loss-of-function.

[0502] Next, the association of rare pLoF or predicted deleterious variants in WNT5B was estimated with fracture, the most important clinical complication arising from low bone mineral density. This analysis was performed in individuals of European ancestry, using phenotypic data from several large-scale cohorts, including UKB, MyCode Community Health Initiative cohort from the Geisinger Health System (GHS), University of Pennsylvania Penn Medicine BioBank (PMBB), The Mount Sinai BioMe BioBank Program (Sinai), and Malmo Diet and Cancer Study (MDCS). The burden of rare pLoF or predicted deleterious variants was associated with a lower risk of any fracture (a broad outcome including any fracture involving any anatomical site) and a lower risk of major fracture (a more specific set of fracture types excluding fractures involving the skull, hands, or feet; FIG. 3). A further analysis of the aggregate burden of WNT5B pLoF variants revealed similar effect estimates (FIG. 3). These results indicate that loss-of-function of WNT5B is associated with a higher BMD, and protection against fracture in humans.

[0503] FIG. 4 shows all pLoF and predicted deleterious variants included in the WNT5B gene burden analyses of eBMD and fracture outcomes.

### Example 3: Machine-Learning Algorithm Applied to Common Genetic Variation at WNT5B Identifies Further Evidence Implicating WNT5B as the Causal Gene Mediating the Association with eBMD

[0504] A machine-learning algorithm (Effector Index) was applied to eBMD genome-wide association data and observed strong evidence to suggest that WNT5B is the causal gene mediating the eBMD GWAS association in this genomic region (Effector index=0.93).

### Example 4: Converging Evidence from Exome Sequencing and Common Variants Implicates WNT5B for Osteoporosis

### UKB Cohort

[0505] From within the UKB, a total of 291,932 participants (278,807 of European ancestry and 13,125 of African, East-Asian, or South Asian ancestry) with available whole-exome sequencing and eBMD data were included in the analyses.

### Whole Exome Sequencing in UKB

[0506] Sample preparation and sequencing of the UKB samples were performed as previously described and briefly summarized below. A modified version of the xGen exome design available from Integrated DNA Technologies was used for target DNA capture. Sequencing was performed using 75 bp paired-end reads on Illumina NovaSeq instruments. Sequencing had a coverage depth sufficient to provide greater than 20× coverage over 90% of targeted bases in 99% of samples. Variant calling and annotation were based on the GRCh38 Human Genome reference sequence and Ensembl v85 gene definitions using the snpEff software. Variants were annotated according to the most deleterious functional effect in this order (of descending deleteriousness): frameshift, stop-gain, stop-loss, splice acceptor, splice donor, in-frame indel, missense, other annotations. Predicted LOF variants included: a) insertions or deletions resulting in a frameshift, b) insertions, deletions or single nucleotide variants resulting in the introduction of a premature stop codon or in the loss of the transcription start site or stop site, and c) variants in donor or acceptor splice sites. Missense variants were classified for predicted functional impact using a number of in silico prediction algorithms that predicted deleteriousness (SIFT, PolyPhen2 (HDIV), PolyPhen2 (HVAR), LRT, and MutationTaster). For each gene, the alternative allele frequency (AAF) and functional annotation of each variant determined inclusion into seven gene burden exposures as previously described (Akbari et al., 2021, Science 373, eabf8683): 1) pLOF variants with AAF<1%; 2) pLOF or missense variants predicted deleterious by 5/5 algorithms with AAF<1%; 3) pLOF or missense variants predicted deleterious by 5/5 algorithms with AAF<0.1%; 4) pLOF or missense variants predicted deleterious by at least 1/5 algorithms with AAF<1%; 5) pLOF or missense variants predicted deleterious by at least 1/5 algorithms with AAF<0.1%; 6) pLOF or any missense with AAF<1%; 7) pLOF or any missense variants with AAF<0.1%. SNP array genotyping and imputation was performed in the UKB as previously described.

### Phenotype Definition in UKB

[0507] eBMD of the heel was derived from quantitative ultrasound SOS and broadband ultrasound attenuation using a previously described model (Morris et al., Nat. Genet., 2018, 51, 258-66). An in-depth data curation pipeline yielded high quality eBMD data while maximizing the number of participants compared to using direct bone-densitometry of the heel reported in UKB as reported in a previous study. eBMD is used as a surrogate of bone mineral density (BMD) because of eBMD's high correlation with dual-energy X-ray absorptiometry (DXA)-derived BMD (Pearson's correlation r=0.69) and eBMD's strong association with risk of osteoporotic fracture. Before analysis, rank-inverse normal transformation of the eBMD phenotype, by sex and within each ancestry, was performed.

### Exome-Wide Association Analyses in UKB

[0508] The association of genetic variants or their gene burden with eBMD by fitting mixed-effects regression models using REGENIE v1.0.6.8 was estimated. REGENIE accounts for relatedness, polygenicity, and population structure by approximating the genomic kinship matrix using predictions of individual trait values that are based on genotypes from across the genome. Then, the association of genetic variants or their burden is estimated conditional upon that polygenic predictor along with other covariates. Covariates in association models included age, age², sex, age-by-sex interaction term, age²-by-sex interaction term, experimental batch-related covariates, ten common-variant derived principal components, and twenty rare-variant derived principal components. To ensure that rare coding variant or gene-burden associations were statistically independent of eBMD-associated common genetic variants, exome association analyses for sentinel common variants (MAF≥1%) identified by fine-mapping genome-wide associations of common alleles with eBMD were further adjusted as previously described (Akbari et al., 2021, Science 373, eabf8683). Meta-analysis between subgroup results were performed using fixed-effect inverse-variance weighted models. The exome-wide level of statistical significance for the gene burden analysis was defined as p<3.6×10⁻², a Bonferroni correction at the type I error rate of 0.05 which assumes 20,000 genes and accounts for the seven variant selection models used per gene (Akbari et al., 2021, Science 373, eabf8683). In a secondary analysis, the association with eBMD of individual nonsynonymous and/or pLOF variants (minor allele frequency <1% and minor allele count ≥25) identified by exome sequencing was estimated. The threshold of p<5×10⁻⁸, which is a Bonferroni correction based on one million effective number of independent tests at the type I error rate of 0.05, was used to identify exome-wide significant single variants as described (Akbari et al., 2021, Science 373, eabf8683).

[0509] For all secondary analyses involving false discovery rate (FDR)-corrected results, FDR-adjusted p-values were obtained by first preselecting for each gene and each gene-burden exposures with the strongest associations (lowest p value) and then correcting for multiple testing using the Benjamini-Hochberg approach across all genes in this subset. Hence, the reported FDR threshold of 1% (corresponding to an unadjusted p-value threshold of 1.49×10⁻⁵) is applied to 18,866 genes, after selection of the best gene-burden exposure per gene. This translates to an FDR threshold of 2.05%, if the FDR correction had been applied to the overall analysis, and not a preselected subset.

### Fine-Mapping of GWAS Common Variants

[0510] eBMD-associated common variants were identified by performing a genome-wide association study based on imputed genetic variants. Imputation was based on the HRC reference panel supplemented with UK10K. Genome-wide association analyses were performed in the UKB by fitting mixed-effects linear regression models using REGENIE v1.0.6.8. Within each ancestry, fine-mapping was performed using the FINEMAP software at genomic regions harboring genetic variants associated with eBMD at the genome-wide significance threshold of p<5×10⁻⁸. Linkage disequilibrium was estimated using genetic data from the exact set of individuals included in each ancestry-specific genome-wide association analyses.

Test of Association with Fracture and Osteoporosis

[0511] The association with fracture and osteoporosis in UK Biobank was tested for genes that met the exome-wide level of statistical significance in the gene burden analysis of eBMD. Fracture cases were defined as individuals with a history of electronic health record-coded or self-reported fracture (not including, where possible, fractures of the skull, facial bones, hands, or toes), and individuals with a history of any type of fracture were excluded from the control group. Osteoporosis cases were defined as individuals with a history of electronic health record-coded or self-reported osteoporosis. Individuals with a self-reported history of osteopaenia were further excluded from the control group.

### Test of Enrichment for Positive Control Genes for Osteoporosis

[0512] To evaluate the ability of WES to detect effector genes for osteoporosis, a set of positive control genes for this disease was identified. Fifty-six protein coding genes which are either known drug targets for osteoporosis or whose perturbation causes a Mendelian form of osteoporosis or bone mass disease, resulting in changes to bone density, bone mineralization or bone mass, were included as positive control genes (Morris et al., Nat. Genet., 2018, 51, 258-66). A Fisher's test was used to estimate the enrichment for positive control genes among the exome-wide significant genes in the gene burden analysis.

Effector Index for eBMD Effector Genes

[0513] The development of Effector index (Ei) was recently described (Forgetta et al., Hum. Genet., 2022, (world wide web at “doi.org/10.1007/s00439-022-02434-z”). A goal of the Ei is to generate a probability of causality for each protein coding gene at a genome-wide association study (GWAS) locus, assigning a score from zero to one. GWAS loci were defined by 500 kb around the lead GWAS SNP following linkage disequilibrium (LD) clumping (Forgetta et al., Hum. Genet., 2022, world wide web at “doi.org/10.1007/s00439-022-02434-z”). Protein coding genes with at least 50% of their gene body located in a GWAS locus were included, and overlapping GWAS loci were merged. In short, to generate Ei scores for eBMD, positive control genes for 12 diseases and traits (type 2 diabetes, low-density lipoprotein cholesterol level, adult height, calcium level, hypothyroidism, triglyceride level, eBMD, glucose level, red blood cell count systolic blood pressure, diastolic blood pressure, and direct bilirubin level) were selected. GWAS followed by fine-mapping was performed for each disease, and genomic annotations at GWAS loci were used as features to predict positive control genes. This was achieved by first training a gradient boosted trees algorithm (XGBoost) to generate the probability of causality for genes in GWAS loci for 11 diseases and traits (excluding eBMD), and then applying this trained algorithm to derive Ei scores from eBMD GWAS data. Generalized linear models implemented in R were used to assess the association of the Ei score with the odds of being an exome-wide significant gene. A further, complementary gene prioritization method called Polygenic Priority Score (PoPS) was used to identify effector genes for eBMD from GWAS data (Weeks et al., medRxiv,2020, world wide web at “doi:10.1101/2020.09.08.20190561.”

Test of Enrichment for Ei Prioritized Genes within Loci Identified Using Exome-Wide Gene-Burden Results for Osteoporosis

[0514] 2×2 contingency tables were generated comparing genes prioritized by Ei to genes identified from the exome-wide analyses per locus. The data were then aggregated across these loci and tested for enrichment using a stratified Fisher's exact test approach. Estimation of the odds ratio and its confidence interval were then based on the conditional Maximum Likelihood Estimate and estimation of the exact confidence bounds using the tail approach for discrete distributions, respectively.

### Two-Sample Mendelian Randomization

[0515] Two-sample Mendelian randomization (MR) analyses were performed to identify circulating proteins that influence eBMD. Two-sample MR uses genetic variants strongly and specifically associated with circulating protein levels (pQTLs) as instrumental variables to estimate the causal relationship between a given protein and an outcome (in this case eBMD). This approach was less affected by confounding and reverse causality than observational epidemiology biomarker studies. The MR framework was based on three main assumptions: First, the SNPs are robustly associated with the exposure. Second, the SNPs are not associated with factors that confound the relationship between the exposure and the outcome. Third, the SNPs have no effect on the outcome that is independent of the exposure (i.e., a lack of horizontal pleiotropy). Of these, the most challenging to assess is the third assumption since the biological mechanistic effect of SNPs on outcomes like eBMD is most often not known. However, in the case of circulating proteins, SNPs that are associated with the protein level and close to the gene that encodes the protein are more likely to have an effect via the protein level by influencing the transcription or translation of the gene into the protein. Such SNPs are called cis-SNPs and may help to reduce potential bias from horizontal pleiotropy.

[0516] To select genetic instruments for circulating proteins, summary-level data were used from two proteomic GWAS studies that both measured serum protein levels on the SOMAlogic platform. For the primary analysis, the INTERVAL study was used as a source of pQTL data, which included the measurement of 1,478 serum proteins in 3,301 individuals. In a replication analysis, the AGES study was used, which included measurement of 4,137 serum proteins in 3,200 individuals. Proteins were selected for inclusion in the analysis if the proteins had cis-acting associated SNPs (“cis-SNPs”), because such instruments may be less likely to be affected by horizontal pleiotropy (Swerdlow et al., Int. J. Epidemiol. 2016, 45, 1600-16). The cis-SNPs from INTERVAL were independent, genome-wide significant SNPs (P<1.5×10⁻¹¹, the multiple-testing corrected genome-wide significance threshold previously adopted in INTERVAL) within 1 Mb of the transcription start site (TSS) of the gene encoding the protein. To select these cis-SNPs, PLINK and the 1000 Genomes Project European population reference panel (1KG EUR) were used to clump and select independent SNPs (R²<0.001, distance 1000 kb) for each protein. The cis-SNPs from AGES were the sentinel cis-SNPs (genome-wide significant SNPs of P<5×10⁻⁸ and with the lowest P value for each protein) within 300 kb of the corresponding protein-coding gene (Milsson et al., Science, 2018, 1327, 1-12). The association of each cis-SNP with eBMD (i.e. the outcome in the MR analysis) was taken from a recent eBMD GWAS, including 426,824 white British individuals (Surakka et al., Nat. Commun., 2020, 11, 4093). Palindromic cis-SNPs with minor allele frequency (MAF)>0.42 (as recommended by the TwoSampleMR R package) were removed prior to MR to prevent allele-mismatches. For cis-SNPs that were not present in the eBMD GWAS, SNPs with LD R²>0.8 and with MAF<0.42 were selected as proxies. For the alignment of SNP proxies, MAF>0.3 was used as a threshold for removal of palindromic SNPs.

[0517] After matching of the cis-SNPs of proteins with eBMD GWAS and the removal of palindromic SNPs, 550 SOMAmer reagents (517 proteins) from INTERVAL (including 515 matching cis-SNPs and 59 LD-proxy cis-SNPs) and 749 circulating proteins from AGES (including 706 unique matching cis-SNPs, 41 LD-proxy cis-SNPs, and 2 cis-SNPs each for two proteins) were included in the MR analyses.

[0518] MR analyses were performed using the TwoSampleMR package in R, using the Wald ratio eBMD (β_{eBMD}/βₚᵣₒₜₑᵢₙ) to 1 estimate the effect of each circulating protein on eBMD. For any proteins with multiple independent cis-SNPs, the inverse variance weighted (IVW) method was used to meta-analyze their combined effects. A Bonferroni correction was used to control for the number proteins tested in INTERVAL and AGES independently.

### Results

[0519] Whole-exome sequencing was performed in nearly 300,000 people from the UK Biobank cohort (UKB and, for each gene in the genome, estimated associations with eBMD for the burden of rare nonsynonymous and/or pLOF variants. In the larger European ancestry subset of UKB (N=278,807), WNT5B was identified (p<3.6×10⁻⁷). This association did not arise from common genetic variants since these WES analyses were designed to be independent of eBMD-associated fine-mapped common alleles. Table 2 shows all variants in the WNT5B gene burden test that were observed in only one ancestry.

TABLE 2

| | | | | | Beta | Beta | | |
|---|---|---|---|---|---|---|---|---|
| | Genetic | | | | (95% CI) | (95% CI) | | |
| | exposure, | | | | per | per | | |
| | variant | | | | allele in | allele in | | |
| | type; allele | | | AAF, | SD | g/cm2 | | |
| | frequency | | | fraction | units of | units of | | Protein |
| Ancestry | cut-off in % | CPRA | RSID | of 1 | eBMD | eBMD | p | effect |
| EUR | pLOF plus | 12:1646053: | rs200149826 | 2.87E−05 | −0.036 | −0.0043 | 8.72E−01 | p.Thr294Met: |
| | deleterious | C:T | | | (−0.47, | (−0.057, | | p.Thr294Met: |
| | missense | | | | 0.4) | 0.049) | | p.Thr294Met |
| | (5/5); AAF | | | | | | | |
| | <0.1% | | | | | | | |
| EUR | pLOF plus | 12:1632839: | rs757999440 | 2.51E−05 | 0.39 | 0.047 | 1.03E−01 | p.Arg88Trp: |
| | deleterious | C:T | | | (−0.078, | (−0.0095, | | p.Arg88Trp: |
| | missense | | | | 0.86) | 0.1) | | p.Arg88Trp: |
| | (5/5); AAF | | | | | | | p.Arg88Trp |
| | <0.1% | | | | | | | |
| EUR | pLOF plus | 12:1645874: | rs762959465 | 2.33E−05 | −0.14 | −0.016 | 5.82E−01 | p.Gln234His: |
| | deleterious | G:T | | | (−0.62, | (−0.075, | | p.Gln234His: |
| | missense | | | | 0.35) | 0.042) | | p.Gln234His |
| | (5/5); AAF | | | | | | | |
| | <0.1% | | | | | | | |
| EUR | pLOF plus | 12:1645947: | rs760453823 | 1.97E−05 | 0.27 | 0.033 | 3.14E−01 | p.Arg259Cys: |
| | deleterious | C:T | | | (−0.26, | (−0.031, | | p.Arg259Cys: |
| | missense | | | | 0.8) | 0.097) | | p.Arg259Cys |
| | (5/5); AAF | | | | | | | |
| | <0.1% | | | | | | | |
| EUR | pLOF plus | 12:1639926: | rs760946804 | 1.97E−05 | 0.23 | 0.028 | 3.94E−01 | p.Glu191Lys: |
| | deleterious | G:A | | | (−0.3, | (−0.036, | | p.Glu191Lys: |
| | missense | | | | 0.76) | 0.092) | | p.Glu191Lys |
| | (5/5); AAF | | | | | | | |
| | <0.1% | | | | | | | |
| EUR | pLOF plus | 12:1632845: | rs371737181 | 1.97E−05 | −0.0022 | 0.00026 | 9.94E−01 | p.Arg90Trp: |
| | deleterious | C:T | | | (−0.53, | (−0.064, | | p.Arg90Trp: |
| | missense | | | | 0.52) | 0.064) | | p.Arg90Trp: |
| | (5/5); AAF | | | | | | | p.Arg90Trp |
| | <0.1% | | | | | | | |
| EUR | pLOF plus | 12:1645854: | rs1309058271 | 1.61E−05 | 0.37 | 0.044 | 2.17E−01 | p.Leu228Val: |
| | deleterious | C:G | | | (−0.22, | (−0.026, | | p.Leu228Val: |
| | missense | | | | 0.95) | 0.12) | | p.Leu228Val |
| | (5/5); AAF | | | | | | | |
| | <0.1% | | | | | | | |
| EUR | pLOF plus | 12:1646157: | rs759111206 | 1.43E−05 | 0.85 | 0.1 | 6.82E−03 | p.Val329Met: |
| | deleterious | G:A | | | (0.23, | (0.028, | | p.Val329Met: |
| | missense | | | | 1.5) | 0.18) | | p.Val329Met |
| | (5/5); AAF | | | | | | | |
| | <0.1% | | | | | | | |
| EUR | pLOF plus | 12:1632829: | | 1.43E−05 | 0.62 | 0.075 | 5.08E−02 | p.Gln84His: |
| | deleterious | G:T | | | (−0.002, | (−0.00025, | | p.Gln84His: |
| | missense | | | | 1.2) | 0.15) | | p.Gln84His: |
| | (5/5); AAF | | | | | | | p.Gln84His |
| | <0.1% | | | | | | | |
| EUR | pLOF plus | 12:1639962: | | 1.43E−05 | 0.38 | 0.047 | 2.22E−01 | p.Glu203Lys: |
| | deleterious | G:A | | | (−0.23, | (−0.028, | | p.Glu203Lys: |
| | missense | | | | 1) | 0.12) | | p.Glu203Lys |
| | (5/5); AAF | | | | | | | |
| | <0.1% | | | | | | | |
| EUR | pLOF plus | 12:1645878: | rs371734267 | 1.43E−05 | −0.076 | −0.0092 | 8.10E−01 | p.Ala236Thr: |
| | deleterious | G:A | | | (−0.69, | (−0.084, | | p.Ala236Thr: |
| | missense | | | | 0.54) | 0.066) | | p.Ala236Thr |
| | (5/5); AAF | | | | | | | |
| | <0.1% | | | | | | | |
| EUR | pLOF plus | 12:1645887: | rs1262622082 | 1.26E−05 | 0.37 | 0.045 | 2.70E−01 | p.Arg239Cys: |
| | deleterious | C:T | | | (−0.29, | (−0.035, | | p.Arg239Cys: |
| | missense | | | | 1) | 0.13) | | p.Arg239Cys |
| | (5/5); AAF | | | | | | | |
| | <0.1% | | | | | | | |
| EUR | pLOF plus | 12:1632849: | rs769562673 | 1.26E−05 | −0.22 | −0.027 | 5.10E−01 | p.Arg91Gln: |
| | deleterious | G:A | | | (−0.88, | (−0.11, | | p.Arg91Gln: |
| | missense | | | | 0.44) | 0.053) | | p.Arg91Gln: |
| | (5/5); AAF | | | | | | | p.Arg91Gln |
| | <0.1% | | | | | | | |
| EUR | pLOF plus | 12:1646169: | | 1.08E−05 | 0.45 | 0.054 | 2.19E−01 | p.Arg333Cys: |
| | deleterious | C:T | | | (−0.27, | (−0.032, | | p.Arg333Cys: |
| | missense | | | | 1.2) | 0.14) | | p.Arg333Cys |
| | (5/5); AAF | | | | | | | |
| | <0.1% | | | | | | | |
| EUR | pLOF plus | 12:1631434: | rs750995675 | 1.08E−05 | −0.37 | −0.045 | 3.05E−01 | |
| | deleterious | GGTGA:G | | | (−1.1, | (−0.13, | | |
| | missense | | | | 0.34) | 0.041) | | |
| | (5/5); AAF | | | | | | | |
| | <0.1% | | | | | | | |
| EUR | pLOF plus | 12:1639790: | | 8.97E−06 | 0.69 | 0.083 | 8.40E−02 | p.Lys150fs: |
| | deleterious | G:GACGGC− | | | (−0.092, | (−0.011, | | p.Lys150fs: |
| | missense | GCGGCCCA | | | 1.5) | 0.18) | | p.Lys150fs |
| | (5/5); AAF | | | | | | | |
| | <0.1% | | | | | | | |
| EUR | pLOF plus | 12:1639861: | rs1387960028 | 8.97E−06 | 0.44 | 0.053 | 2.71E−01 | p.Arg170fs: |
| | deleterious | AC:A | | | (−0.34, | (−0.041, | | p.Arg170fs: |
| | missense | | | | 1.2) | 0.15) | | p.Arg170fs |
| | (5/5); AAF | | | | | | | |
| | <0.1% | | | | | | | |
| EUR | pLOF plus | 12:1639887: | | 8.97E−06 | 0.35 | 0.043 | 3.74E−01 | p.Ala178Ser: |
| | deleterious | G:T | | | (−0.43, | (−0.052, | | p.Ala178Ser: |
| | missense | | | | 1.1) | 0.14) | | p.Ala178Ser |
| | (5/5); AAF | | | | | | | |
| | <0.1% | | | | | | | |
| EUR | pLOF plus | 12:1646011: | rs760795270 | 8.97E−06 | 0.3 | 0.036 | 4.57E−01 | p.Tyr280Cys: |
| | deleterious | A:G | | | (−0.48, | (−0.059, | | p.Tyr280Cys: |
| | missense | | | | 1.1) | 0.13) | | p.Tyr280Cys |
| | (5/5); AAF | | | | | | | |
| | <0.1% | | | | | | | |
| EUR | pLOF plus | 12:1639 | rs1320546094 | 8.97E−06 | −0.28 | −0.035 | 4.75E−01 | p.Arg179Trp: |
| | deleterious | 890:C:T | | | (−1.1, | (−0.13, | | p.Arg179Trp: |
| | missense | | | | 0.5) | 0.06) | | p.Argl79Trp |
| | (5/5); AAF | | | | | | | |
| | <0.1% | | | | | | | |
| EUR | pLOF plus | 12:1646076: | rs1055138580 | 7.17E−06 | 1.1 | 0.14 | 9.87E−03 | p.Arg302Cys: |
| | deleterious | C:T | | | (0.28, | (0.034, | | p.Arg302Cys: |
| | missense | | | | 2) | 0.25) | | p.Arg302Cys |
| | (5/5); AAF | | | | | | | |
| | <0.1% | | | | | | | |
| EUR | pLOF plus | 12:1632770: | | 7.17E−06 | 0.63 | 0.076 | 1.57E−01 | p.Tyr65His: |
| | deleterious | T:C | | | (−0.24, | (−0.029, | | p.Tyr65His: |
| | missense | | | | 1.5) | 0.18) | | p.Tyr65His: |
| | (5/5); AAF | | | | | | | p.Tyr65His |
| | <0.1% | | | | | | | |
| EUR | pLOF plus | 12:1639702: | rs773895251 | 5.38E−06 | 1.4 | 0.17 | 7.37E−03 | p.Phe116Ser: |
| | deleterious | T:C | | | (0.37, | (0.045, | | p.Phe116Ser: |
| | missense | | | | 2.4) | 0.29) | | p.Phe116Ser |
| | (5/5); AAF | | | | | | | |
| | <0.1% | | | | | | | |
| EUR | pLOF plus | 12:1645920: | rs139541360 | 5.38E−06 | 1.3 | 0.15 | 1.30E−02 | p.Asp250Asn: |
| | deleterious | G:A | | | (0.27, | (0.033, | | p.Asp250Asn: |
| | missense | | | | 2.3) | 0.28) | | p.Asp250Asn |
| | (5/5); AAF | | | | | | | |
| | <0.1% | | | | | | | |
| EUR | pLOF plus | 12:1646011: | | 5.38E−06 | 0.64 | 0.077 | 2.16E−01 | p.Val281fs: |
| | deleterious | ATG:A | | | (−0.37, | (−0.045, | | p.Val281fs: |
| | missense | | | | 1.6) | 0.2) | | p.Val281fs |
| | (5/5); AAF | | | | | | | |
| | <0.1% | | | | | | | |
| EUR | pLOF plus | 12:1632905: | rs1458153942 | 5.38E−06 | 0.52 | 0.064 | 3.08E−01 | p.Gly110Arg: |
| | deleterious | G:C | | | (−0.48, | (−0.059, | | p.Gly110Arg: |
| | missense | | | | 1.5) | 0.19) | | p.Gly110Arg: |
| | (5/5); AAF | | | | | | | p.Gly110Arg |
| | <0.1% | | | | | | | |
| EUR | pLOF plus | 12:1639690: | rs1412281823 | 5.38E−06 | 0.46 | 0.056 | 3.66E−01 | p.Arg112Gln: |
| | deleterious | G:A | | | (−0.54, | (−0.066, | | p.Arg112Gln: |
| | missense | | | | 1.5) | 0.18) | | p.Arg112Gln |
| | (5/5); AAF | | | | | | | |
| | <0.1% | | | | | | | |
| EUR | pLOF plus | 12:1639747: | rs751763308 | 5.38E−06 | 0.46 | 0.055 | 3.76E−01 | p.Arg131Gln: |
| | deleterious | G:A | | | (−0.55, | (−0.067, | | p.Arg131Gln: |
| | missense | | | | 1.5) | 0.18) | | p.Arg131Gln |
| | (5/5); AAF | | | | | | | |
| | <0.1% | | | | | | | |
| EUR | pLOF plus | 12:1639867: | rs951792194 | 5.38E−06 | −0.42 | −0.051 | 4.15E−01 | p.Phe171Tyr: |
| | deleterious | T:A | | | (−1.4, | (−0.17, | | p.Phe171Tyr: |
| | missense | | | | 0.59) | 0.071) | | p.Phe171Tyr |
| | (5/5); AAF | | | | | | | |
| | <0.1% | | | | | | | |
| EUR | pLOF plus | 12:1639789: | | 5.38E−06 | −0.16 | −0.019 | 7.63E−01 | p.Arg145Leu: |
| | deleterious | G:T | | | (−1.2, | (−0.14, | | p.Arg145Leu: |
| | missense | | | | 0.85) | 0.1) | | p.Arg145Leu |
| | (5/5); AAF | | | | | | | |
| | <0.1% | | | | | | | |
| EUR | pLOF plus | 12:1646008: | rs1175280077 | 5.38E−06 | 0.12 | 0.015 | 8.10E−01 | p.Val279Ala: |
| | deleterious | T:C | | | (−0.88, | (−0.11, | | p.Val279Ala: |
| | missense | | | | 1.1) | 0.14) | | p.Val279Ala |
| | (5/5); AAF | | | | | | | |
| | <0.1% | | | | | | | |
| EUR | pLOF plus | 12:1639833: | | 5.38E−06 | 0.033 | 0.004 | 9.49E−01 | p.Gly160Arg: |
| | deleterious | G:C | | | (−0.97, | (−0.12, | | p.Gly160Arg: |
| | missense | | | | 1) | 0.13) | | p.Gly160Arg |
| | (5/5); AAF | | | | | | | |
| | <0.1% | | | | | | | |
| EUR | pLOF plus | 12:1632804: | rs772660910 | 3.59E−06 | −1.3 | −0.15 | 4.58E−02 | p.Ala76Val: |
| | deleterious | C:T | | | (−2.5, | (−0.3, | | p.Ala76Val: |
| | missense | | | | −0.024) | −0.0029) | | p.Ala76Val: |
| | (5/5); AAF | | | | | | | p.Ala76Val |
| | <0.1% | | | | | | | |
| EUR | pLOF plus | 12:1645938: | rs767732690 | 3.59E−06 | 0.98 | 0.12 | 1.21E−01 | p.Arg256Cys: |
| | deleterious | C:T | | | (−0.26, | (−0.031, | | p.Arg256Cys: |
| | missense | | | | 2.2) | 0.27) | | p.Arg256Cys |
| | (5/5); AAF | | | | | | | |
| | <0.1% | | | | | | | |
| EUR | pLOF plus | 12:1632734: | rs749569775 | 3.59E−06 | 0.87 | 0.11 | 1.69E−01 | p.Gly53Arg: |
| | deleterious | G:A | | | (−0.37, | (−0.045, | | p.Gly53Arg: |
| | missense | | | | 2.1) | 0.25) | | p.Gly53Arg: |
| | (5/5); AAF | | | | | | | p.Gly53Arg |
| | <0.1% | | | | | | | |
| EUR | pLOF plus | 12:1639815: | rs767779811 | 3.59E−06 | 0.77 | 0.093 | 2.23E−01 | p.Arg154Trp: |
| | deleterious | C:T | | | (−0.47, | (−0.057, | | p.Arg154Trp: |
| | missense | | | | 2) | 0.24) | | p.Arg154Trp |
| | (5/5); AAF | | | | | | | |
| | <0.1% | | | | | | | |
| EUR | pLOF plus | 12:1646034: | | 3.59E−06 | 0.72 | 0.088 | 2.51E−01 | p.Cys288Arg: |
| | deleterious | T:C | | | (−0.51, | (−0.062, | | p.Cys288Arg: |
| | missense | | | | 2) | 0.24) | | p.Cys288Arg |
| | (5/5); AAF | | | | | | | |
| | <0.1% | | | | | | | |
| EUR | pLOF plus | 12:1646068: | rs772694572 | 3.59E−06 | −0.63 | −0.077 | 3.16E−01 | p.Thr299Met: |
| | deleterious | C:T | | | (−1.9, | (−0.23, | | p.Thr299Met: |
| | missense | | | | 0.6) | 0.073) | | p.Thr299Met |
| | (5/5); AAF | | | | | | | |
| | <0.1% | | | | | | | |
| EUR | pLOF plus | 12:1632720: | | 3.59E−06 | 0.58 | 0.071 | 3.55E−01 | p.Cys48Tyr: |
| | deleterious | G:A | | | (−0.65, | (−0.079, | | p.Cys48Tyr: |
| | missense | | | | 1.8) | 0.22) | | p.Cys48Tyr: |
| | (5/5); AAF | | | | | | | p.Cys48Tyr |
| | <0.1% | | | | | | | |
| EUR | pLOF plus | 12:1639953: | | 3.59E−06 | 0.53 | 0.064 | 4.00E−01 | p.Asn201fs: |
| | deleterious | C:CA | | | (−0.7, | (−0.085, | | p.Asn201fs: |
| | missense | | | | 1.8) | 0.21) | | p.Asn201fs |
| | (5/5); AAF | | | | | | | |
| | <0.1% | | | | | | | |
| EUR | pLOF plus | 12:1645849: | | 3.59E−06 | 0.41 | 0.049 | 5.19E−01 | p.Cys226Ser: |
| | deleterious | G:C | | | (−0.83, | (−0.1, | | p.Cys226Ser: |
| | missense | | | | 1.6) | 0.2) | | p.Cys226Ser |
| | (5/5); AAF | | | | | | | |
| | <0.1% | | | | | | | |
| EUR | pLOF plus | 12:1645896: | rs757332468 | 3.59E−06 | −0.38 | −0.046 | 5.47E−01 | p.Gly242Arg: |
| | deleterious | G:A | | | (−1.6, | (−0.2, | | p.Gly242Arg: |
| | missense | | | | 0.86) | 0.1) | | p.Gly242Arg |
| | (5/5); AAF | | | | | | | |
| | <0.1% | | | | | | | |
| EUR | pLOF plus | 12:1646134: | rs766383768 | 3.59E−06 | 0.37 | 0.045 | 5.56E−01 | p.Arg321His: |
| | deleterious | G:A | | | (−0.86, | (−0.1, | | p.Arg321His: |
| | missense | | | | 1.6) | 0.19) | | p.Arg321His |
| | (5/5); AAF | | | | | | | |
| | <0.1% | | | | | | | |
| EUR | pLOF plus | 12:1646044: | rs1224683209 | 3.59E−06 | 0.28 | 0.034 | 6.56E−01 | p.Asn291Ser: |
| | deleterious | A:G | | | (−0.95, | (−0.12, | | p.Asn291Ser: |
| | missense | | | | 1.5) | 0.18) | | p.Asn291Ser |
| | (5/5); AAF | | | | | | | |
| | <0.1% | | | | | | | |
| EUR | pLOF plus | 12:1639716: | | 3.59E−06 | 0.26 | 0.032 | 6.74E−01 | p.Ser121Gly: |
| | deleterious | A:G | | | (−0.97, | (−0.12, | | p.Ser121Gly: |
| | missense | | | | 1.5) | 0.18) | | p.Ser121Gly |
| | (5/5); AAF | | | | | | | |
| | <0.1% | | | | | | | |
| EUR | pLOF plus | 12:1645927: | rs1248072165 | 3.59E−06 | −0.24 | −0.03 | 6.97E−01 | p.Ala252Val: |
| | deleterious | C:T | | | (−1.5, | (−0.18, | | p.Ala252Val: |
| | missense | | | | 0.99) | 0.12) | | p.Ala252Val |
| | (5/5); AAF | | | | | | | |
| | <0.1% | | | | | | | |
| EUR | pLOF plus | 12:1639806: | | 3.59E−06 | −0.22 | −0.026 | 7.32E−01 | p.Asp151Tyr: |
| | deleterious | G:T | | | (−1.4, | (−0.18, | | p.Asp151Tyr: |
| | missense | | | | 1) | 0.12) | | p.Asp151Tyr |
| | (5/5); AAF | | | | | | | |
| | <0.1% | | | | | | | |
| EUR | pLOF plus | 12:1639767: | | 3.59E−06 | −0.2 | −0.024 | 7.50E−01 | p.Leu138Phe: |
| | deleterious | C:T | | | (−1.4, | (−0.17, | | p.Leu138Phe: |
| | missense | | | | 1) | 0.13) | | p.Leu138Phe |
| | (5/5); AAF | | | | | | | |
| | <0.1% | | | | | | | |
| EUR | pLOF plus | 12:1645977: | rs1307764751 | 3.59E−06 | 0.18 | 0.022 | 7.71E−01 | p.Arg269Cys: |
| | deleterious | C:T | | | (−1.1, | (−0.13, | | p.Arg269Cys: |
| | missense | | | | 1.4) | 0.17) | | p.Arg269Cys |
| | (5/5); AAF | | | | | | | |
| | <0.1% | | | | | | | |
| EUR | pLOF plus | 12:1631356: | | 3.59E−06 | 0.11 | 0.014 | 8.55E−01 | p.Met1?: |
| | deleterious | T:C | | | (−1.1, | (−0.14, | | p.Met1?: |
| | missense | | | | 1.3) | 0.16) | | p.Met1?: |
| | (5/5); AAF | | | | | | | p.Met1? |
| | <0.1% | | | | | | | |
| EUR | pLOF plus | 12:1646177: | | 3.59E−06 | 0.091 | 0.011 | 8.85E−01 | p.Cys336fs: |
| | deleterious | CT:C | | | (−1.1, | (−0.14, | | p.Cys336fs: |
| | missense | | | | 1.3) | 0.16) | | p.Cys336fs |
| | (5/5); AAF | | | | | | | |
| | <0.1% | | | | | | | |
| EUR | pLOF plus | 12:1639781: | | 3.59E−06 | 0.09 | 0.011 | 8.86E−01 | p.Cys143fs: |
| | deleterious | CTGCAG:C | | | (−1.1, | (−0.14, | | p.Cys143fs: |
| | missense | | | | 1.3) | 0.16) | | p.Cys143fs |
| | (5/5); AAF | | | | | | | |
| | <0.1% | | | | | | | |
| EUR | pLOF plus | 12:1639788: | | 3.59E−06 | 0.09 | 0.011 | 8.86E−01 | p.Arg145fs: |
| | deleterious | C:CAA | | | (−1.1, | (−0.14, | | p.Arg145fs: |
| | missense | | | | 1.3) | 0.16) | | p.Arg145fs |
| | (5/5); AAF | | | | | | | |
| | <0.1% | | | | | | | |
| EUR | pLOF plus | 12:1639793: | | 3.59E−06 | 0.09 | 0.011 | 8.86E−01 | p.Ala147fs: |
| | deleterious | G:GCAAGGAC | | | (−1.1, | (−0.14, | | p.Ala147fs: |
| | missense | | | | 1.3) | 0.16) | | p.Ala147fs |
| | (5/5); AAF | | | | | | | |
| | <0.1% | | | | | | | |
| EUR | pLOF plus | 12:1646229: | rs1447197412 | 1.79E−06 | 2.3 | 0.27 | 1.11E−02 | p.Val353Met: |
| | deleterious | G:A | | | (0.52, | (0.063, | | p.Val353Met: |
| | missense | | | | 4) | 0.49) | | p.Val353Met |
| | (5/5); AAF | | | | | | | |
| | <0.1% | | | | | | | |
| EUR | pLOF plus | 12:1639778: | | 1.79E−06 | 2.1 | 0.26 | 1.80E−02 | p.Cys141Trp: |
| | deleterious | C:G | | | (0.36, | (0.044, | | p.Cys141Trp: |
| | missense | | | | 3.9) | 0.47) | | p.Cys141Trp |
| | (5/5); AAF | | | | | | | |
| | <0.1% | | | | | | | |
| EUR | pLOF plus | 12:1645968: | | 1.79E−06 | 2 | 0.24 | 2.33E−02 | p.Val266fs: |
| | deleterious | GTC:G | | | (0.27, | (0.033, | | p.Val266fs: |
| | missense | | | | 3.8) | 0.46) | | p.Val266fs |
| | (5/5); AAF | | | | | | | |
| | <0.1% | | | | | | | |
| SAS | pLOF plus | 12:1646217: | | 7.55E−05 | 2 | 0.24 | 3.52E−02 | p.Cys349Gly: |
| | deleterious | T:G | | | (0.14, | (0.017, | | p.Cys349Gly: |
| | missense | | | | 3.8) | 0.46) | | p.Cys349Gly |
| | (5/5); AAF | | | | | | | |
| | <0.1% | | | | | | | |
| EUR | pLOF plus | 12:1639761: | | 1.79E−06 | −1.8 | −0.22 | 4.34E−02 | p.Leu138fs: |
| | deleterious | G:GGCGA | | | (−3.5, | (−0.43, | | p.Leu138fs: |
| | missense | | | | −0.053) | −0.0064) | | p.Leu138fs |
| | (5/5); AAF | | | | | | | |
| | <0.1% | | | | | | | |
| EUR | pLOF plus | 12:1639895: | | 1.79E−06 | 1.7 | 0.21 | 5.20E−02 | p.Arg181fs: |
| | deleterious | GC:G | | | (−0.015, | (−0.0018, | | p.Arg181fs: |
| | missense | | | | 3.5) | 0.42) | | p.Arg181fs |
| | (5/5); AAF | | | | | | | |
| | <0.1% | | | | | | | |
| EUR | pLOF plus | 12:1632816: | | 1.79E−06 | −1.4 | −0.17 | 1.18E−01 | p.Ile80Ser: |
| | deleterious | T:G | | | (−3.1, | (−0.38, | | p.Ile80Ser: |
| | missense | | | | 0.35) | 0.043) | | p.Ile80Ser: |
| | (5/5); AAF | | | | | | | p.Ile80Ser |
| | <0.1% | | | | | | | |
| EUR | pLOF plus | 12:1645888: | rs529807731 | 1.79E−06 | 1.3 | 0.16 | 1.34E−01 | p.Arg239Leu: |
| | deleterious | G:T | | | (−0.41, | (−0.05, | | p.Arg239Leu: |
| | missense | | | | 3.1) | 0.37) | | p.Arg239Leu |
| | (5/5); AAF | | | | | | | |
| | <0.1% | | | | | | | |
| EUR | pLOF plus | 12:1639966: | rs1469472968 | 1.79E−06 | −1.3 | −0.16 | 1.41E−01 | p.Ala204Val: |
| | deleterious | C:T | | | (−3.1, | (−0.37, | | p.Ala204Val: |
| | missense | | | | 0.43) | 0.053) | | p.Ala204Val |
| | (5/5); AAF | | | | | | | |
| | <0.1% | | | | | | | |
| EUR | pLOF plus | 12:1639971: | | 1.79E−06 | −1.2 | −0.15 | 1.66E−01 | p.Arg206Gly: |
| | deleterious | C:G | | | (−3, | (−0.36, | | p.Arg206Gly: |
| | missense | | | | 0.51) | 0.062) | | p.Arg206Gly |
| | (5/5); AAF | | | | | | | |
| | <0.1% | | | | | | | |
| EUR | pLOF plus | 12:1639972: | | 1.79E−06 | −1.2 | −0.14 | 1.80E−01 | p.Arg206Leu: |
| | deleterious | G:T | | | (−2.9, | (−0.36, | | p.Arg206Leu: |
| | missense | | | | 0.55) | 0.067) | | p.Arg206Leu |
| | (5/5); AAF | | | | | | | |
| | <0.1% | | | | | | | |
| EUR | pLOF plus | 12:1646250: | | 1.79E−06 | 1.2 | 0.14 | 1.86E−01 | p.Ter360Glnext*?: |
| | deleterious | T:C | | | (−0.57, | (−0.069, | | p.Ter360Glnext*?: |
| | missense | | | | 2.9) | 0.35) | | p.Ter360GInext*? |
| | (5/5); AAF | | | | | | | |
| | <0.1% | | | | | | | |
| EUR | pLOF plus | 12:1639752: | | 1.79E−06 | −1.1 | −0.14 | 1.98E−01 | p.Cys133Ser: |
| | deleterious | T:A | | | (−2.9, | (−0.35, | | p.Cys133Ser: |
| | missense | | | | 0.6) | 0.073) | | p.Cys133Ser |
| | (5/5); AAF | | | | | | | |
| | <0.1% | | | | | | | |
| EUR | pLOF plus | 12:1639788: | rs940079271 | 1.79E−06 | 1.1 | 0.13 | 2.16E−01 | p.Arg145Trp: |
| | deleterious | C:T | | | (−0.64, | (−0.078, | | p.Arg145Trp: |
| | missense | | | | 2.8) | 0.35) | | p.Arg145Trp |
| | (5/5); AAF | | | | | | | |
| | <0.1% | | | | | | | |
| EUR | pLOF plus | 12:1645919: | | 1.79E−06 | −1.1 | −0.13 | 2.17E−01 | p.Tyr249*: |
| | deleterious | C:G | | | (−2.8, | (−0.35, | | p.Tyr249*: |
| | missense | | | | 0.65) | 0.078) | | p.Tyr249* |
| | (5/5); AAF | | | | | | | |
| | <0.1% | | | | | | | |
| EUR | pLOF plus | 12:1639965: | rs1404252517 | 1.79E−06 | 0.95 | 0.12 | 2.85E−01 | p.Ala204Thr: |
| | deleterious | G:A | | | (−0.79, | (−0.096, | | p.Ala204Thr: |
| | missense | | | | 2.7) | 0.33) | | p.Ala204Thr |
| | (5/5); AAF | | | | | | | |
| | <0.1% | | | | | | | |
| EUR | pLOF plus | 12:1639798: | | 1.79E−06 | −0.95 | −0.11 | 2.87E−01 | p.Arg148Pro: |
| | deleterious | G:C | | | (−2.7, | (−0.33, | | p.Arg148Pro: |
| | missense | | | | 0.8) | 0.097) | | p.Arg148Pro |
| | (5/5); AAF | | | | | | | |
| | <0.1% | | | | | | | |
| EUR | pLOF plus | 12:1632852: | | 1.79E−06 | 0.91 | 0.11 | 3.06E−01 | p.Trp92*: |
| | deleterious | G:A | | | (−0.83, | (−0.1, | | p.Trp92*: |
| | missense | | | | 2.7) | 0.32) | | p.Trp92*: |
| | (5/5); AAF | | | | | | | p.Trp92* |
| | <0.1% | | | | | | | |
| EUR | pLOF plus | 12:1639869: | | 1.79E−06 | 0.89 | 0.11 | 3.16E−01 | p.Ala172Pro: |
| | deleterious | G:C | | | (−0.85, | (−0.1, | | p.Ala172Pro: |
| | missense | | | | 2.6) | 0.32) | | p.Ala172Pro |
| | (5/5); AAF | | | | | | | |
| | <0.1% | | | | | | | |
| EUR | pLOF plus | 12:1646061: | | 1.79E−06 | −0.88 | −0.11 | 3.23E−01 | p.Leu297Val: |
| | deleterious | C:G | | | (−2.6, | (−0.32, | | p.Leu297Val: |
| | missense | | | | 0.87) | 0.1) | | p.Leu297Val |
| | (5/5); AAF | | | | | | | |
| | <0.1% | | | | | | | |
| EUR | pLOF plus | 12:1646083: | | 1.79E−06 | 0.86 | 0.1 | 3.32E−01 | p.Cys304Tyr: |
| | deleterious | G:A | | | (−0.88, | (−0.11, | | p.Cys304Tyr: |
| | missense | | | | 2.6) | 0.32) | | p.Cys304Tyr |
| | (5/5); AAF | | | | | | | |
| | <0.1% | | | | | | | |
| EUR | pLOF plus | 12:1639747: | rs751763308 | 1.79E−06 | 0.84 | 0.1 | 3.45E−01 | p.Arg131Pro: |
| | deleterious | G:C | | | (−0.9, | (−0.11, | | p.Arg131Pro: |
| | missense | | | | 2.6) | 0.31) | | p.Arg131Pro |
| | (5/5); AAF | | | | | | | |
| | <0.1% | | | | | | | |
| EUR | pLOF plus | 12:1639971: | | 1.79E−06 | −0.81 | −0.098 | 3.62E−01 | p.Arg206Cys: |
| | deleterious | C:T | | | (−2.6, | (−0.31, | | p.Arg206Cys: |
| | missense | | | | 0.93) | 0.11) | | p.Arg206Cys |
| | (5/5); AAF | | | | | | | |
| | <0.1% | | | | | | | |
| EUR | pLOF plus | 12:1646053: | | 1.79E−06 | 0.79 | 0.096 | 3.73E−01 | p.Ser296fs: |
| | deleterious | C:CG | | | (−0.95, | (−0.12, | | p.Ser296fs: |
| | missense | | | | 2.5) | 0.31) | | p.Ser296fs |
| | (5/5); AAF | | | | | | | |
| | <0.1% | | | | | | | |
| EUR | pLOF plus | 12:1639779: | rs369464409 | 1.79E−06 | 0.79 | 0.096 | 3.75E−01 | p.Gly142Ser: |
| | deleterious | G:A | | | (−0.96, | (−0.12, | | p.Gly142Ser: |
| | missense | | | | 2.5) | 0.31) | | p.Gly142Ser |
| | (5/5); AAF | | | | | | | |
| | <0.1% | | | | | | | |
| EUR | pLOF plus | 12:1645885: | | 1.79E−06 | 0.78 | 0.094 | 3.83E−01 | p.Phe238Ser: |
| | deleterious | T:C | | | (−0.97, | (−0.12, | | p.Phe238Ser: |
| | missense | | | | 2.5) | 0.31) | | p.Phe238Ser |
| | (5/5); AAF | | | | | | | |
| | <0.1% | | | | | | | |
| EUR | pLOF plus | 12:1645873: | | 1.79E−06 | 0.75 | 0.091 | 3.98E−01 | p.Gln234Leu: |
| | deleterious | A:T | | | (−0.99, | (−0.12, | | p.Gln234Leu: |
| | missense | | | | 2.5) | 0.3) | | p.Gln234Leu |
| | (5/5); AAF | | | | | | | |
| | <0.1% | | | | | | | |
| EUR | pLOF plus | 12:1632735: | | 1.79E−06 | −0.75 | −0.091 | 4.00E−01 | p.Gly53Glu: |
| | deleterious | G:A | | | (−2.5, | (−0.3, | | p.Gly53Glu: |
| | missense | | | | 1) | 0.12) | | p.Gly53Glu: |
| | (5/5); AAF | | | | | | | p.Gly53Glu |
| | <0.1% | | | | | | | |
| EUR | pLOF plus | 12:1646030: | | 1.79E−06 | −0.75 | −0.091 | 4.00E−01 | p.Asp286Glu: |
| | deleterious | C:G | | | (−2.5, | (−0.3, | | p.Asp286Glu: |
| | missense | | | | 1) | 0.12) | | p.Asp286Glu |
| | (5/5); AAF | | | | | | | |
| | <0.1% | | | | | | | |
| EUR | pLOF plus | 12:1645797: | | 1.79E−06 | −0.67 | −0.082 | 4.50E−01 | p.Val209Met: |
| | deleterious | G:A | | | (−2.4, | (−0.29, | | p.Val209Met: |
| | missense | | | | 1.1) | 0.13) | | p.Val209Met: |
| | (5/5); AAF | | | | | | | p.Cys111Tyr |
| | <0.1% | | | | | | | |
| EUR | pLOF plus | 12:1646101: | | 1.79E−06 | 0.65 | 0.078 | 4.67E−01 | p.Gly310Val: |
| | deleterious | G:T | | | (−1.1, | (−0.13, | | p.Gly310Val: |
| | missense | | | | 2.4) | 0.29) | | p.Gly310Val |
| | (5/5); AAF | | | | | | | |
| | <0.1% | | | | | | | |
| EUR | pLOF plus | 12:1632757: | | 1.79E−06 | 0.64 | 0.078 | 4.70E−01 | p.Lys60Asn: |
| | deleterious | G:T | | | (−1.1, | (−0.13, | | p.Lys60Asn: |
| | missense | | | | 2.4) | 0.29) | | p.Lys60Asn: |
| | (5/5); AAF | | | | | | | p.Lys60Asn |
| | <0.1% | | | | | | | |
| EUR | pLOF plus | 12:1646017: | | 1.79E−06 | 0.64 | 0.078 | 4.72E−01 | p.Asp282Gly: |
| | deleterious | A:G | | | (−1.1, | (−0.13, | | p.Asp282Gly: |
| | missense | | | | 2.4) | 0.29) | | p.Asp282Gly |
| | (5/5); AAF | | | | | | | |
| | <0.1% | | | | | | | |
| EUR | pLOF plus | 12:1645857: | | 1.79E−06 | 0.62 | 0.076 | 4.84E−01 | p.Lys229Gln: |
| | deleterious | A:C | | | (−1.1, | (−0.14, | | p.Lys229Gln: |
| | missense | | | | 2.4) | 0.29) | | p.Lys229Gln |
| | (5/5); AAF | | | | | | | |
| | <0.1% | | | | | | | |
| SAS | pLOF plus | 12:1639839: | | 7.55E−05 | −0.63 | −0.077 | 5.02E−01 | p.Gly162Arg: |
| | deleterious | G:A | | | (−2.5, | (−0.3, | | p.Gly162Arg: |
| | missense | | | | 1.2) | 0.15) | | p.Gly162Arg |
| | (5/5); AAF | | | | | | | |
| | <0.1% | | | | | | | |
| SAS | pLOF plus | 12:1645881: | | 7.55E−05 | 0.63 | 0.076 | 5.05E−01 | p.Glu237*: |
| | deleterious | G:T | | | (−1.2, | (−0.15, | | p.Glu237*: |
| | missense | | | | 2.5) | 0.3) | | p.Glu237* |
| | (5/5); AAF | | | | | | | |
| | <0.1% | | | | | | | |
| EUR | pLOF plus | 12:1639782: | | 1.79E−06 | −0.59 | −0.071 | 5.09E−01 | p.Ala147fs: |
| | deleterious | T:TGCAGCC− | | | (−2.3, | (−0.28, | | p.Ala147fs: |
| | missense | GGAC | | | 1.2) | 0.14) | | p.Ala147fs |
| | (5/5); AAF | | | | | | | |
| | <0.1% | | | | | | | |
| EUR | pLOF plus | 12:1639879: | rs1228543278 | 1.79E−06 | 0.55 | 0.067 | 5.35E−01 | p.Phe175Ser: |
| | deleterious | T:C | | | (−1.2, | (−0.14, | | p.Phe175Ser: |
| | missense | | | | 2.3) | 0.28) | | p.Phe175Ser |
| | (5/5); AAF | | | | | | | |
| | <0.1% | | | | | | | |
| SAS | pLOF plus | 12:1646073: | | 7.55E−05 | 0.52 | 0.063 | 5.83E−01 | p.Gly301Cys: |
| | deleterious | G:T | | | (−1.3, | (−0.16, | | p.Gly301Cys: |
| | missense | | | | 2.4) | 0.29) | | p.Gly301Cys |
| | (5/5); AAF | | | | | | | |
| | <0.1% | | | | | | | |
| EUR | pLOF plus | 12:1632833: | | 1.79E−06 | −0.49 | −0.059 | 5.83E−01 | p.Gln86fs: |
| | deleterious | CA:C | | | (−2.2, | (−0.27, | | p.Gln86fs: |
| | missense | | | | 1.3) | 0.15) | | p.Gln86fs: |
| | (5/5); AAF | | | | | | | p.Gln86fs |
| | <0.1% | | | | | | | |
| EAS | pLOF plus | 12:1646194: | | 0.0003592 | −0.49 | −0.059 | 5.90E−01 | p.Cys341Ser: |
| | deleterious | G:C | | | (−2.3, | (−0.28, | | p.Cys341Ser: |
| | missense | | | | 1.3) | 0.16) | | p.Cys341Ser |
| | (5/5); AAF | | | | | | | |
| | <0.1% | | | | | | | |
| EUR | pLOF plus | 12:1639762: | | 1.79E−06 | 0.48 | 0.058 | 5.92E−01 | p.Gly136Asp: |
| | deleterious | G:A | | | (−1.3, | (−0.15, | | p.Gly136Asp: |
| | missense | | | | 2.2) | 0.27) | | p.Gly136Asp |
| | (5/5); AAF | | | | | | | |
| | <0.1% | | | | | | | |
| SAS | pLOF plus | 12:1639968: | | 7.55E−05 | 0.49 | 0.059 | 6.03E−01 | p.Gly205Arg: |
| | deleterious | G:C | | | (−1.4, | (−0.16, | | p.Gly205Arg: |
| | missense | | | | 2.3) | 0.28) | | p.Gly205Arg |
| | (5/5); AAF | | | | | | | |
| | <0.1% | | | | | | | |
| EUR | pLOF plus | 12:1632792: | | 1.79E−06 | 0.44 | 0.054 | 6.19E−01 | p.Ile72Arg: |
| | deleterious | T:G | | | (−1.3, | (−0.16, | | p.Ile72Arg: |
| | missense | | | | 2.2) | 0.27) | | p.Ile72Arg: |
| | (5/5); AAF | | | | | | | p.Ile72Arg |
| | <0.1% | | | | | | | |
| EUR | pLOF plus | 12:1646130: | rs765125177 | 1.79E−06 | −0.41 | −0.049 | 6.49E−01 | p.Gly320Arg: |
| | deleterious | G:A | | | (−2.2, | (−0.26, | | p.Gly320Arg: |
| | missense | | | | 1.3) | 0.16) | | p.Gly320Arg |
| | (5/5); AAF | | | | | | | |
| | <0.1% | | | | | | | |
| EUR | pLOF plus | 12:1639847: | | 1.79E−06 | −0.38 | −0.046 | 6.73E−01 | p.Asn164Lys: |
| | deleterious | C:G | | | (−2.1, | (−0.26, | | p.Asn164Lys: |
| | missense | | | | 1.4) | 0.17) | | p.Asn164Lys |
| | (5/5); AAF | | | | | | | |
| | <0.1% | | | | | | | |
| EUR | pLOF plus | 12:1639782: | | 1.79E−06 | 0.36 | 0.044 | 6.82E−01 | p.Cys143Arg: |
| | deleterious | T:C | | | (−1.4, | (−0.17, | | p.Cys143Arg: |
| | missense | | | | 2.1) | 0.26) | | p.Cys143Arg |
| | (5/5); AAF | | | | | | | |
| | <0.1% | | | | | | | |
| EUR | pLOF plus | 12:1639711: | rs759186540 | 1.79E−06 | −0.36 | −0.044 | 6.84E−01 | p.Ala119Gly: |
| | deleterious | C:G | | | (−2.1, | (−0.26, | | p.Ala119Gly: |
| | missense | | | | 1.4) | 0.17) | | p.Ala119Gly |
| | (5/5); AAF | | | | | | | |
| | <0.1% | | | | | | | |
| EUR | pLOF plus | 12:1646031: | | 1.79E−06 | 0.36 | 0.044 | 6.84E−01 | p.Tyr287Asn: |
| | deleterious | T:A | | | (−1.4, | (−0.17, | | p.Tyr287Asn: |
| | missense | | | | 2.1) | 0.26) | | p.Tyr287Asn |
| | (5/5); AAF | | | | | | | |
| | <0.1% | | | | | | | |
| EUR | pLOF plus | 12:1639861: | | 1.79E−06 | 0.32 | 0.039 | 7.17E−01 | p.Tyr169Cys: |
| | deleterious | A:G | | | (−1.4, | (−0.17, | | p.Tyr169Cys: |
| | missense | | | | 2.1) | 0.25) | | p.Tyr169Cys |
| | (5/5); AAF | | | | | | | |
| | <0.1% | | | | | | | |
| EUR | pLOF plus | 12:1646095: | rs1307904661 | 1.79E−06 | 0.31 | 0.037 | 7.30E−01 | p.Ser308Leu: |
| | deleterious | C:T | | | (−1.4, | (−0.17, | | p.Ser308Leu: |
| | missense | | | | 2.1) | 0.25) | | p.Ser308Leu |
| | (5/5); AAF | | | | | | | |
| | <0.1% | | | | | | | |
| EUR | pLOF plus | 12:1645926: | rs763442249 | 1.79E−06 | 0.3 | 0.037 | 7.34E−01 | p.Ala252Thr: |
| | deleterious | G:A | | | (−1.4, | (−0.18, | | p.Ala252Thr: |
| | missense | | | | 2) | 0.25) | | p.Ala252Thr |
| | (5/5); AAF | | | | | | | |
| | <0.1% | | | | | | | |
| EUR | pLOF plus | 12:1645998: | | 1.79E−06 | −0.29 | −0.035 | 7.47E−01 | p.Asp277fs: |
| | deleterious | G:GA | | | (−2, | (−0.25, | | p.Asp277fs: |
| | missense | | | | 1.5) | 0.18) | | p.Asp277fs |
| | (5/5); AAF | | | | | | | |
| | <0.1% | | | | | | | |
| EUR | pLOF plus | 12:1646235: | | 1.79E−06 | 0.27 | 0.032 | 7.66E−01 | p.Gln355Glu: |
| | deleterious | C:G | | | (−1.5, | (−0.18, | | p.Gln355Glu: |
| | missense | | | | 2) | 0.24) | | p.Gln355Glu |
| | (5/5); AAF | | | | | | | |
| | <0.1% | | | | | | | |
| EUR | pLOF plus | 12:1632720: | | 1.79E−06 | 0.26 | 0.031 | 7.73E−01 | p.Cys48Phe: |
| | deleterious | G:T | | | (−1.5, | (−0.18, | | p.Cys48Phe: |
| | missense | | | | 2) | 0.24) | | p.Cys48Phe: |
| | (5/5); AAF | | | | | | | p.Cys48Phe |
| | <0.1% | | | | | | | |
| EUR | pLOF plus | 12:1632838: | rs542305945 | 1.79E−06 | 0.24 | 0.029 | 7.88E−01 | p.Phe87Leu: |
| | deleterious | C:G | | | (−1.5, | (−0.18, | | p.Phe87Leu: |
| | missense | | | | 2) | 0.24) | | p.Phe87Leu: |
| | (5/5); AAF | | | | | | | p.Phe87Leu |
| | <0.1% | | | | | | | |
| EUR | pLOF plus | 12:1639836: | | 1.79E−06 | −0.2 | −0.024 | 8.26E−01 | p.Cys161Arg: |
| | deleterious | T:C | | | (−1.9, | (−0.24, | | p.Cys161Arg: |
| | missense | | | | 1.5) | 0.19) | | p.Cys161Arg |
| | (5/5); AAF | | | | | | | |
| | <0.1% | | | | | | | |
| EUR | pLOF plus | 12:1639722: | | 1.79E−06 | −0.18 | −0.022 | 8.39E−01 | p.Ala123Pro: |
| | deleterious | G:C | | | (−1.9, | (−0.23, | | p.Ala123Pro: |
| | missense | | | | 1.6) | 0.19) | | p.Ala123Pro |
| | (5/5); AAF | | | | | | | |
| | <0.1% | | | | | | | |
| EUR | pLOF plus | 12:1632888: | | 1.79E−06 | 0.16 | 0.019 | 8.59E−01 | p.Arg105fs: |
| | deleterious | GGA:G | | | (−1.6, | (−0.19, | | p.Arg105fs: |
| | missense | | | | 1.9) | 0.23) | | p.Arg105fs: |
| | (5/5); AAF | | | | | | | p.Arg105fs |
| | <0.1% | | | | | | | |
| EUR | pLOF plus | 12:1639689: | rs906923865 | 1.79E−06 | −0.15 | −0.018 | 8.65E−01 | p.Arg112*: |
| | deleterious | C:T | | | (−1.9, | (−0.23, | | p.Arg112*: |
| | missense | | | | 1.6) | 0.19) | | p.Arg112* |
| | (5/5); AAF | | | | | | | |
| | <0.1% | | | | | | | |
| SAS | pLOF plus | 12:1639764: | rs771228804 | 7.55E−05 | 0.15 | 0.018 | 8.77E−01 | p.Glu137Lys: |
| | deleterious | G:A | | | (−1.7, | (−0.21, | | p.Glu137Lys: |
| | missense | | | | 2) | 0.24) | | p.Glu137Lys |
| | (5/5); AAF | | | | | | | |
| | <0.1% | | | | | | | |
| EUR | pLOF plus | 12:1639732: | | 1.79E−06 | 0.14 | 0.017 | 8.78E−01 | p.Val126Asp: |
| | deleterious | T:A | | | (−1.6, | (−0.2, | | p.Val126Asp: |
| | missense | | | | 1.9) | 0.23) | | p.Val126Asp |
| | (5/5); AAF | | | | | | | |
| | <0.1% | | | | | | | |
| EUR | pLOF plus | 12:1632804: | | 1.79E−06 | 0.11 | 0.014 | 8.99E−01 | p.Ala76Gly: |
| | deleterious | C:G | | | (−1.6, | (−0.2, | | p.Ala76Gly: |
| | missense | | | | 1.9) | 0.23) | | p.Ala76Gly: |
| | (5/5); AAF | | | | | | | p.Ala76Gly |
| | <0.1% | | | | | | | |
| AFR | pLOF plus | 12:1646159: | rs750923586 | 9.79E−05 | 0.11 | 0.013 | 9.11E−01 | p.Gln330fs: |
| | deleterious | GC:G | | | (−1.8, | (−0.21, | | p.Gln330fs: |
| | missense | | | | 2) | 0.24) | | p.Gln330fs |
| | (5/5); AAF | | | | | | | |
| | <0.1% | | | | | | | |
| EUR | pLOF plus | 12:1639726: | | 1.79E−06 | 0.092 | 0.011 | 9.17E−01 | p.Gly124Ala: |
| | deleterious | G:C | | | (−1.7, | (−0.2, | | p.Gly124Ala: |
| | missense | | | | 1.8) | 0.22) | | p.Gly124Ala |
| | (5/5); AAF | | | | | | | |
| | <0.1% | | | | | | | |
| EUR | pLOF plus | 12:1632858: | | 1.79E−06 | 0.07 | 0.0085 | 9.37E−01 | p.Cys94Phe: |
| | deleterious | G:T | | | (−1.7, | (−0.2, | | p.Cys94Phe: |
| | missense | | | | 1.8) | 0.22) | | p.Cys94Phe: |
| | (5/5); AAF | | | | | | | p.Cys94Phe |
| | <0.1% | | | | | | | |
| EUR | pLOF plus | 12:1646026: | | 1.79E−06 | 0.061 | 0.0074 | 9.45E−01 | p.Pro285Arg: |
| | deleterious | C:G | | | (−1.7, | (−0.2, | | p.Pro285Arg: |
| | missense | | | | 1.8) | 0.22) | | p.Pro285Arg |
| | (5/5); AAF | | | | | | | |
| | <0.1% | | | | | | | |
| EUR | pLOF plus | 12:1632881: | | 1.79E−06 | 0.016 | 0.0019 | 9.86E−01 | p.Val102Ile: |
| | deleterious | G:A | | | (−1.7, | (−0.21, | | p.Val102Ile: |
| | missense | | | | 1.8) | 0.21) | | p.Val102Ile: |
| | (5/5); AAF | | | | | | | p.Val102Ile |
| | <0.1% | | | | | | | |
| EUR | pLOF plus | 12:1645 993: | | 1.79E−06 | 0.0053 | 0.00064 | 9.95E−01 | p.Thr274Ile: |
| | deleterious | C:T | | | (−1.7, | (−0.21, | | p.Thr274Ile: |
| | missense | | | | 1.8) | 0.21) | | p.Thr274Ile |
| | (5/5); AAF | | | | | | | |
| | <0.1% | | | | | | | |

Abbreviations: pLOF, predicted loss of function; CPRA, chromosome position reference alternative; RR, reference homozygote genotype; RA, reference-alternative genotype; AA, alternative homozygote genotype; SD, standard deviation; CI, confidence interval; p, P-value; AAF alternative allele frequency; AAC, alternate allele count.

[0520] Table 3 shows that WNT5B was discovered exclusively in multi-ancestry meta-analysis of eBMD (Genetic exposure, variant type; frequency cutoff in %=pLOF plus deleterious missense (5/5); AAF<1%). Abbreviations: European, EUR; African, AFR; South asians, SAS; East asians, EAS; predicted loss of function, pLOF; alternative allele frequency, AAF; confidence interval, CI; standard deviation, SD; estimated bone mineral density, eBMD; P-value, p; reference-reference genotype, RR; reference-alternative genotype, RA; alternative-alternative genotype, AA; grams per square centimeter, g/cm²; ratio of true heterogeneity to total observed variation, 12.

TABLE 3

| | | Beta (95% CI) | Beta (95% CI) | |
|---|---|---|---|---|
| | AAF, | per allele in | per allele in | |
| | fraction | SD units | g/cm² units | |
| Ancestry | of 1 | of eBMD | of eBMD | p |
| EUR | 0.0009 | 0.1994 | 0.0242 | 3.74E−07 |
| | | (0.1225, 0.2764) | (0.0149, 0.0335) | |
| AFR | 0.0009 | 0.258 | 0.0313 | 4.18E−01 |
| | | (−0.3667, 0.8826) | (−0.0445, 0.1071) | |
| EAS | 0.0018 | 0.3881 | 0.0471 | 3.41E−01 |
| | | (−0.4102, 1.1865) | (−0.0498, 0.1439) | |
| SAS | 0.0012 | 0.2532 | 0.0307 | 2.54E−01 |
| | | (−0.1818, 0.6881) | (−0.0221, 0.0835) | |

| | Genotype | p-value for | Multi-ancestry | | |
|---|---|---|---|---|---|
| | counts, | heterogeneity in | beta (95% CI) per | | |
| | RR\|RA\|AA | effect estimates | allele in SD units | Multi- | |
| Ancestry | genotypes | between ancestries | of eBMD | ancestry p | I² |
| EUR | 278,294\|512\|1 | 9.61E−01 | 0.2035 | 9.89335E−08 | 0% |
| AFR | 5,100\|9\|0 | | (0.1287, 0.2784) | | |
| EAS | 1,387\|5\|0 | | | | |
| SAS | 6,609\|14\|1 | | | | |

[0521] Various modifications of the described subject matter, in addition to those described herein, will be apparent to those skilled in the art from the foregoing description. Such modifications are also intended to fall within the scope of the appended claims. Each reference (including, but not limited to, journal articles, U.S. and non-U.S. patents, patent application publications, international patent application publications, gene bank accession numbers, and the like) cited in the present application is incorporated herein by reference in its entirety and for all purposes.

The application's sequence listing, which the Patent Office published only in electronic form, follows.

SEQUENCE LISTING (123 sequences)

SEQ ID NO: 1 - DNA, 71711 bp, homo sapien
aaatgctccagatcctcagtgttcaagaacctcaggaagcttcgcagtcctgcctcgtgcctgcttgaacagctggatgtgggcaggaggctgtgggagcgggccatgccagcagaatcccgccttactctggggacttactcttgtcacagcccctggtgtcctgagggtcatttcagtgtcatgtgagtattactgtggctattggaaaggatttggtacgagtttatttgagaagttaggagctttttttaaaaaaaaaaattatctttgataaatttagtagaatattttgaaagtactttttggacagtaatgaatgaacaaattgctcctgaactagaaggagggatctaaacacatcatctaagtacaacagtatgtctgaaaaatatctctgcttgtcttttatttgccctttaaagtctgtgcaaacaaatgtgaacagcctcaggactctaagaataatatttttctatggatgtgtatggacagataaacaaaaccccaagggagaaaaaacttctatttaaataaaaataaagatcccctacagctccatcctcctttgctcactgggtttgctgtatttcattttgagataaaagtagtttggatgattaacagttgaacaaaaagaaagtatttgtgtctgtctaaatctatctctatcaatgtaatctatcttatttctctaatcttatctatctgtcttatctatcgacctaactgtccatctggttttgaatattccgtattccagccataagtagtagatcttttgcatccctggggttaatggttccttgagcagacactgacactgtgccgttcgggatcccgtggggaaaacaccctcttcctcactggtcagtgataccctgtgctcacagctctactccccctcggaatctcctgtctgaagcccctgtaggactctgggatcctccgaatcggccctctccagctccaagcacactgggatccttgccgcaggaggttgctgttggcttctgcccatgctgtgggtcaggatctgcagccaacaggcgtgggagcttaggaaggcacctggtggtttctcggtaggaaaatagtgtggagtgtgtgcaatcatgtttgaggaagcgtcatgagagggtcactgtctctgtggtagtgtccttagggaaccgtctttgcctggatcctggggtcaggtttggcatgaactctgaacttcctccctccgcaggatcttcagtagaaaggtcctgtcctgaggaaatgctcagaggcacttctcttgctgaggaagcctgcctggatgtgtgtttttgtcctcatggagatgcacatgacaaattgtgtgcaatgcctcagcacagcccaacaggttttttctgtttacacttaactagcctacgacagcgggaggaaaccttaaatatttccttttcttcccacaaacgctttatctaataaaacaaaattactgcagatgaagcagggagtgatttaaatcgtcatttaaatcaaggacctgatttggtttggcctccctgggggaccttttagcttgtgctatgctgataacgtctctacagactaaaccgaccagagcagaaggcagggtggcagtgcccgtggtggggtggacagcgtgggggccggcagtgtcagtcactgagtgctgggttggcccctcactcctccatatttctgtaccagtaaaataggttgaaactgacatcgagggcagcttcaagaaggtggggagagaccacgagggcagtaatgcagaggctgtcaccctctggagctactgctcggggactgagaaggaattcagtcttgaatacatgttaacctcagttcccgctccttatctggactggctggctcccttctgcgccaagaatctgaagcccagctctgtaaagcagcaattcccaactattttccccctaaaatacacgagacgcactcccatggggcctatctagattgcaggctgcggcacagataaatcaggctgtgggttgggcgcagttcccagtaaaaccccacttctttctctcccactcaagaaagcagacctccatacgcgtaagtgggagatggtgctctgtcgccccagcccttggcgggggactcggcctgtaaaagctgccaaataaatatttactaagtgaaagatagccctgaatccacactaatttgtatttttttaaagtcattcataaactttagcattttaactattagttagtaattaatcccaataaaccggcaggattttgtgattgtgaaactgctgcaatgcgttggtcagcaggaatatttgttagcatttttatgggctcttaaagtcgtcttagctgtgttactgataaagccagccacaggctttatcagtcctgccgttggctgtcagcgctgcctggataaactcctcatccttcccgggaagaaacttctagcaatgcttaagcaggaggccagggaagagagaatcttgatactgcctgctcaccataggccctctgggggcctgccctgtgtggacagatgcttcatttcatgatcgtatacaaatcgagagcaagagtctcctagccgcgctgagcgtggggcacttgccacctcactgctgttggaactctggagttggggccaaaggatgtagcccctcctcgggggagggcagtggggtcaggtgaagattcaagagctcctctttgccttgtcatctagttgtcctattctggaggaattttaaataaggatttaaaaaaaaaaaaggacttatgtattattttaaagagcagccttgaataggcaggcatattttagtaaaaataattttttaaccctgcggtgtgaagactgccagtcaaatacagtgatggtcattatcactcacctgcccccgcccccaggctggaggaaacagagtgcagagttagaatgcttctggagcattcatggctgccgggagatgcccgagaggacgttgagggcagggcagggtgagcagggagctagctcaccttaggagtgcagagaccatcccaagcagggtctgcagacactgacttcaggtgaccaggcatggagatggcaggtgaaacaggtaagtatgccccaaaaatgatgggaaagagtgaactgggatcacttagaaatcggaagcaatacaacaaaggctaaacatatttgagtaggagttcagggtagacacgctcttggatatcaagagcataaacagaggagctaacaaaaacactgcagagaagctccatcgccccctgtagttaccccacctagcgtggctgggagaagctgatacttcttttctccgtggattcaggggcatttcccacctattttaggtatgccagtttgacacaatgaactttagacgtaacatttcataactgcgatataatttccttctgtttttaggccttgaacaaaattttctttaatgggaaagcacacattttatactgaattctaattatgttcatcttgttttttgaattatttagctacctctaatagagagtctgaaagatgattacattccacagtactaacattttcaatggccctgaaagacgtgagatgcattgctgctactattttatcaaattattgtttctaaaatgctgttttactcttctagtaggaagagtgacttttaaaacaatggatattggctgggcgtggtggctcacacctgtattcccagcactttgggaggccgaggtgggtggatcacctgagatcaggaatttgagaccagtgtggtcaacatggtgaaaccccatatctactaaaaatacaaaaattagccaggcatgatgacaggcgcctgtaattccagccacttgggaggctgaggcaggagaatacttgaacctgaaggcagaggttgcagtgagccgagatcgcgccactgcactccagcctgggtgacagagcaagacgccgtctctaaaataaaataaaacaatggatagtttgtccaacatggtatgttaaaagcgcagagaagctgaagaatgatgatgaagactaaaataacgatgataagcaaagaactaagcaggcatctgtgcagtgattcaggaggggtgtccatgaggggcggcttcggagcagctctccctgtaacttatctcacagttccctcctcctttaaggagtcagaccacggtgggctttgctttagagacatgccactgtgtgctttgttgctcgtgactatcccttcacctttctagaggtgctcgtcttcatgtaaagtcgggtgaagctttttcactcctggagaaaagctcttacaacatttttgggacaaggagcaggtgtgcctcagcgagcctgtcattatctggggagggggctccagataacacacttctacttgctttctttagggaaacgacatggtctcctcctgtaacactccccaaaagaagtatgaaagccgacataaaatacgaatatgatctttgcattaagtattaaatataataccttcaatgtagtatttgtgcttctctctatccagttctcagttgtttagggatcttctgagggcaaaccaaaaatgtcagtaaagcaaaaatatatcaataaggcatcatactgacgaaaacaaaaccagaggttttaaaaaataatctgggccgggcacggtggctcacgcctgtaatcccagcactttgggaggctgaggtgggtggatcacctgaggtcaggagttcaagaccagctatggtcaacatggtgaaaccccgtctctactaaaacacaaaaattagccgggcatgatggcgcacacctgtaatcccagctactcgagaggctgaggtgggagaatcgcttgaggggagtgggaggttgcagtgagccgagatcgcaccattgcactccagtctcggtgatagggtgagactccatttaaaaaaaaaaaaaaatgtagttatcaattttttgtttttgaccaaaagtatttcaggaactttgaagaaaggacctgaaaattattactcaggctggtatttagtttgctgacttttaactctcagagctgaacagtctaatccttgatcattccagagtgagtttaggaatttgtagtcatttcctttttactgggtatttgcatacatcactaaccagctgggattagaatgagcagtctctcgatgctgaaatggaatgatgagaactcagggccagcctgaaatgttcatcctcatcgattaatccttaatgaacactcatgcatagatgacatcaaagaaggtcctttgcaatgtacagggaagacaaaccagcttccatagtgtacattcttaaaggaaggttccaatagaccgatacacatagttaacattttgtatttttatccatgttttgccccaagattaaacattaggagtaacgtggacatttgctcagtgtcgagggaagggtcagtgcatataactaggaagaaggctatctggcagggttgggaacgtgacctcttgccctccaaagcctgggatgctgaagtgaatgcctccaatcttgcggtgtatggacacagagcgaacgctgccctctgaatacagaccagaggttagaggttaatgaatgggtgctctctccacactcaggatcccgttcaatagcggttttataaataagggcttaaatggggtcagaaaaggacctgcatattgcttccaaactctctacatctttttgaagcaatagtgttcacagatgacatccttccacctgggaagacagagatgaagctcttgtgcttggagaactggacggctactcctggctcagtgtgtctaaaaacaggaccaaatggaaaacatagtggggggggaggtccttgctgccccctattcttctctagtaatcccttaaaaaataattgcggacccaaacctctggcctccagcacattttccacttgattagaggcctttgtgaggtggggaaagggacctgcagacttgtgtattgtgctggggcctgaaatgtccagctgggattttttcccatcaaaaggggattttagtaaaaccattatcaggggcttagaggagaaaagctgttgagctgcaagtgagggggcagattagcattagcgggcttgcttctggccccagtggaggagcgggaaggtgtttgcagccacttgcacacaagttccttagtttctctgcaagttcctggcaggtgcagaggtaggaatgaatacaggagtgggaactaacaggcttgaacaatggcacagggaggctttatctctgaagtatcaagcggaaggcagcccaaatcaggaaggactgcaaggtgttgttgatacctgcttcagtgtgtagacggccgtgggactggcctcattgctgttatgtgtggccacgtcgcctggaatcccccacccacaacactcgacccctctcgacagtcttcatagacggcgacaggaaattcagaaactgggaaatggccatgctggagtcctttaatgggcgaatggacacctttagggtggggggtgggtgtgctggtagcagctaaaagagtacagaggaaggttaggaaagcagcagcagtggctgtcagcctgcaaatcagtgtccgggctgtgtggatttgcagactgagccacgggaacctcctggggagagggtttggggaaggtcccctacaagagaaacgtgcatcatcttgggattactggagccctcagctataccttcctctgcaaaacggagcacagaaactggagtcacgtggtttggatggagaatgttgaagccaatagagtaattgctgcctgaagggcccatgtgaggaatgtcggagccggcctgtcccggaaatgctttttcctatgtgtcctctgtacactgttgctctagcttcccggcagaaatggggtgtggatgaaaacaacgttggtcctgacggctgtgagcacagaactagagtgacagccacatgcctcccgtaggacattttcaggcttgcagtgctgccacctcagaggtctcagtcacaccaacatcctcacgccagcccagtggccacattcgcaagagatttgtctagagtcaaattcaaaggttgtttctgtggttacagaaagagggcctaccttcttgaaaatgaagcccagggccgggcctggtgactcacgtgtgtaatcccagcactttgggaggctgaggcgggtagatcacctgaggtcaggagttcaagacctgcctggccaacatggcaaaaccctgtctctactaaaaaatacaaaaattagccaggcatggtggcacgtgcctgtagtcccaactactcaggaggctgaggcaggagcattgcttgaacccggggagcagaagttgcagtgagctgagattgcaccactgcattccagcctgagcaacagagtgactctgtcgaaagaaaaggaaggaaggaaggaaggaaggaaggaaaggaaagaaggaaaagaaagaaaagaaaggaagaaaaggaagaaagaaagagaaagaagaaagaaaaagagaaagaaagaaagaaaaagaaaagaaaagaaagagaaagaaaacggagtccaggaaagctgttcttggaggctatgaatcaaggagcagccctcccagttcttccgaggagcagctttaggaactgctggtcctcagcgttcacacattcccctcactcagttctcattctggctcctcagccagccccgttttcttcttcttggctttgtgcagggtgatacgtgtttgcttttctttcctttacaacctgtattctctgtttggggtgccttccctgaatctgtattctttcagtgtagtcactaagaatggcatatttcagctattactttccaaaagttgcgcagggagatgttctgctttcataagaccttcacggatggtgccaggaatgaatgtaatttgccttatgcacaggccccaagtccctgaaacttttccttttttatttattctctaaccaaaaatgacgtctatattacagagcttataagctgtggctcctctagccaatacagcttggtagaagcatctgcaggggataactgcctccaccttttttcccacttctacacctgcccttcccactcacagtttgattccccgaggccaggctgttgagtaccaggagggcaagacccgaaggcctctcctgccctcagcctgtctcttcttgtgccattctacggaatctggctacattggctcagaagttatttttgtaagttctgctaccttgtcctaatgtcagttttctgtaggaggaatttaggtcacacaagcaactttacttcttcgtcagggctgttattattttcatcttcatagactctcttatattttatgaagatgtcttcatctgggcaataaagatactccttttaataaaaattaaaaaaaattaaaaaaaagatactcctaaaattttaaaatgttttttcctgaaaggctctctagaatttgtcctcacagatacacttctgatttttcttttgtaataaaaaaaactagctctttttcttgctgtttaaattgatacctccatgtatgactaaaatttttcccattttcttcctcccaaactccccagatatggcaatctaagaaggatttgtatgaagtgccctttaagaagaattagaagtttaaagagaaaaaaaaaaaagcattagaagttaatgtttgattctcttagctccaaaagcagagagctgcaaaataacacctggctctggggagtaacctcactgatattttaaaattcaatttcatcttttccaggaagtgaaattcctcatttgtcaactcttacgcctggaggaaatactttgcgggtgcgggtgaaagagaaaggaccagaggggatttgttagatgggaggaggttgtggttccccttgggaaatagcttccaactcacagacaatgctgccacctactgacaagaccaagacatgggacgtgcagacttcgtggatttctccactttctgtcttccacagtggaggacatttagttttgcattaaccatactttattgtactaccttatattggaccctaaaatcatgttcataaacttggggtaaagaaaaacacaaggtcggactcctagttttaataactccaggacaggtgtggatatgattcacagctgcttcacaatggggaaggtaaattgtgtgtaagagggttttttgttgtttttttaaagggctggggaggctgaagcaacagtccagaaggagacaataacagttttccagccctacctttcaataatgtgtagtgcttgacttttacctcttaacccacatatgcacatttttatttctaaagaaagcagttgtaggctcctgcaatctcagcactttgggaggccgagatgggaggatcacttgagcccaggagttggagaccagcctaggcagcatagcgagaccctgtctctacaaaaaaaaaataataatagtaataatgggcatggtggcacatgcctgtggtcccagctactcgggaggctgaggtgggaggattgcttgagctcaggaagtcgaggctgcagtgagatatgatcacaccgctgcacttcagcctgggtgacagagcgagaccccaactctaaaaatcaataaagcagggatgaagctgtttgctgctaaatcctgtgtcctacgttaatgagtttctgcagttccccttgtgattccattgaaaattagacccttctgtgtagggaagagagaggccagctgccttcctgggggtcatgctgttctgattgttgacatctgaccctgagcacaatggcagggcatctgtctcaagtgcacagacatcagctagggctggaagagccaatcctccatctactccaggctctggaaacttgaagaccttttctgcttcgtacaaccgtcagctgtcagctggatgaagttcagggggccacagaacttaaccatcctgcttttacagattcctgaaaactggctaaattctgtgcatctgaagtaaattaggaaaggtagaaattgtcactttcatcttgtcattttcgtgttgtttgcttaagacacacgtactggccatcttgtcgttgttgttgttcacagcagtggagttttgggcaatgaagttaaggtttaaattactgaaagcagaaatgcttgtcttccatctgagaacatgaagcatttatttgaggggcgtttgcgggcttaactgttacaatttctcccttactttactcatgtgtccaattttagcctcagtgattgttctagagattctcagaaatagcaggactaatttttttggctcctccctgtttagtgactacgtctcagaaagccttgccttgggctagaaaaaggtagcagatgtgtggccgggcgcggtggctcacgcctgtcatcccagcactttgggaggccgaggcaggcggatcacaaggtcaggagatcgagaccatcctgactaacatggtgaaaccccgtctctactaaaaatacaaaaaattagccgggcgtggtggcaggtgcctgtggtccccgctactcgggaggctgagccaggagaatggcgtgaacccgggaggcagagcttgcagtgagccaagattgtgccactgtactccagcctgggcgacagagcgagactccgtctcaaaaaaaaaaaaaaaatgtagcagacgtgtatgtaaataatgctagtttgaggccaagatttcctaaggagaaatattatgaaccttggtaggaaatatttcctcatatcctttttagatgagaaaaacaatgttttccaagccatagtaattccacattaatatttatgaaaaattaatgtggtctcaactgttttcccacagtccagttccagtgtctcagatccatgatgtaaggagtaattgttgacaccccactgtgtggtaggtctgatccttctggagtgtggattacgtaaatgggggagtaataaatataagaaggtgcctagtattaacaaattagacccttttactctttctggacaagtgggatttgtaactaaaacatctgtgaagtcaagcctttttgcccttgaatgaagagaaaatagctagagtttttgcaacttgattctactttataaaaggattgtgtggcaggtatttatagcatgtgaaatatgtgtgagttcctagctttgaagctctcatgagcatgtacttccagcattagtattctgcattactatgtgcaacaaagcagtgttttggaaactggctcaaatcctctgagagcaacaggcaacagatttgacagttagctacttcagtaccttatagaccatttaacaacatgtactagttttttggtttcctgaataaccctatataatgcttgcaaacatgtctaagtttgcataaggtagtgcatattaaatagtaataacttttagcatttggggttttttttttttttttactcctaatgaaaataatatgctttggtgtggcaccttttaagaaacttttttttaaggctgaggtagaaagatcccttgagcccagaagtccgagattgtagtgagctctgatcatgccactgcactccagcctgggcaacagagcgagactctgtctcaaaaaaaagacaaaaaataataatttttttaagagatggggttttgctgtgtcgcccaggctggtcttgaactcgtgtgttcaagtgatcctcccacctcagccgagtgagtagctgggactacagatgtgtgccgtgcctggcttggtgccacacatctctgaagagagacagggtggtgctttgcagtgcccctgtgagccgcctccatgctggtcaccttctgcattggtcattaagtctagagcagcccaggttctgacactaggttctcctctaattacctaggcaaaatcttttccactttgttaagcatcttttcccatttataaaattaaatgtaccacatctgccagatttgggaaaacaaaaatgttgagacagagaaaccgaacattgtgttatgactgagttcttccacagatcacactcacattcctgacctggtctcacttgggtttctctgctgcgccacggctgcagacccagttctcttctttgtaattgagactcatttgtttccactatcacaaatgcaagtatccttgtaagttttttataaggatataaagcatttgttccttaaacaactaaagtggccgggcgcggtggctcatgcctgtaatcccagcactttgggaggccgaggcgggcggatcacttgaggtcgggagtttgagaccagcctgaccaacatggagaaaccccgtctctaccaaagatacaaaattagccgggcgtggtggcacacgcctgtaatcccagctactcaggagactggggcaggagaatcacttgaacctgggaggcggaggttgcagggagccaagatcgtgccattgcactgcagcctggacaacaagagtgaaactccgtctccgtctcaaaaaaaaaaaaaaaaaaaaattgaagtagaagagtaatgaaataatagaaacttaagtcttctttttaaagaaaatatgtgcacttttctgggttaataaatagcaggcagaggaattccacttcgattgttttattgggagtgggggtttaacataccccactctggtgctgctcagttaagatctcaagcttactttcttttgcacctcaactggagggcttggctttacatacgaccaaatattctgggttggtaaaggcaactccagcaggcaaaatcagagcaatccctggaaaagaggaaaaaactgaaactgatcatttgtggacatttaaatttaccaattgtctagaaattccatacaagagctgagatatatgctcttgttccaactgtgcacttacctttgatacttcattaagtaaattattaatatttggcactgatctaaatatgcatgtcccatctgttttacaactttttaaaaaatttaacttgctgcctgatagttaaccaagtgcattgacagaaatgaggtaagtatgtgacccaagtctgagcttaggtttgaatgcagctttctaatttctaatgctgtgctttactcatgatccacattatttcatcaaaaagcctcacccctctgactcctcaggggttcataatggcacaaaatttaggtcttgccctctactaaagggatggaattaacttttaaaaggggtgatgtttgatgcagggaagagaaagagaacagagagaggggaccactagatgacttactatagtccctccctttctaccgcagaacacagcagagatcagaggccagggctttccctttcatagaactgggaagagacagttgtcagaagctgcatgaggtcttggttttgttttacaaatctgatcttttaatcaagaggttcttattctttagaaacacagtggtccctgggggccactaccctttccctttgaaaacttgaattcgaattctctaagtcaaaagtgaaaggttttgtttgtattctaagaccagcacctatctagtaaccacttcaggaaagcagcaggatttgggagctaggccatgctttaatttacatatcatatgtccttatgtaagagaaagttcatacctttcaaaagaaaaaggaacgtttgcttttttacatctttgttgttcatctgactcatgaaagaacatgatcggttcgagtttatttttaggatatactggtactggcttttagttttagtaaatgttaagttggacaagttaggggcctagcttgggagctgcagaaattggctgagccccacaggtgatttatagataatctttccagtaagaacattgaagggctacacacaatgacacttagaaaaagaagggaaatgaagctgttccttgactactacccagtttctgttgaggtttattacttctagatgataaggtttacacgaagtttacattatgttttttcagttctcaagtttcagcaaatacctgaaccaagtttttttctgttattctaagaactgccctggagtgccttttaacttttgtaccaccacgcaaagtgtactatcaattcatgtcctttagctcttctattcttcaatgcatttctcccattcctgtaggtatggcggggatcaacttttcataccaccaagagtcacccctattccctttgaagtactgccctatggcataagcttgttcatacggtgttcaaacagctaccgttcacttctatgagggtcaccttactggaaaccaaggtatgacgagtaactaaatcttctcatcaagcagaagggagctggactttagaaatggagcctgggccacgcagagtggctcacgcctgtaatcccaggactttgggaggccgaggtgggcagatcgcttgagcccaggagtttgagaccagcctgggcaacatggtgaaaccctgtttctacaaaaaaaatacaaaaaaaaaaaaaaatagccagccatggtggtgtgcgcctgtagtctcagctactcaggaggctaggtgggaggatcacttgaacctgggaagtcaaggctgcagtgggttgtgattgtaccactgcactcctgcctaggcaacagatcaagaccttgtctcaaaaaaaaaaaaaaaaaaaaaagatcaagaccttgtctcaaaaaaaaaaaaaaaaaaagacaggaaggcaggaagacaggaaggaagggagggagggagggagggaaatggagaaatggagcctaggtttgaatcctggctccctcacttactggttgggtaacttacggcaggaattatgacttatctggaaaacagggataatacctgtttcagcaggttgctttgaagattaaaacttacaagtaccttgtaaaacacacataggttctcaacacgttaattgctttccatccaaaaaggttgagagatgagcagttgaccttcactaaccactctaggtggtttatcatctttcccagagaagctccggctatatactaagtatgcctcattcaggataaggatatagctagacccatggtcgtaactttcaaacatcaatttgccgacctttagtcaagcgtatatttaacatttaacgtaaaaaggagacaaaacagaagaacgtgcttcacgttacaggtggtaggaatattttgcctattaaaatgaagaatgtgaatacagagcctaagacttgggtgctcaaatttttatcaattgaatctgtacagccatgcagtctcttggaagaaaaacagactaagaacccactgccgtgtaaccttcaggagttgtgtcaaatgctggattagaaagctgaccctaattcagagtccctacttcttaataggcttcacacttttttttttttccaggcattaagcactgtaacctaagtgggaagaaagagatccacaccttccccaaagaaacagaagatggatctagtgtcaggctcaattagacccaattgtgatgactctccaaaaaggaacaatgcggcttttgtgatatgctcaggcagaaagcttggacattttacaaaacaatcttatcccaagagaaacctgggttccagccctcttcctggaaagaggggttgatccaggaaagttttatactactcttatcagctcttgctgagatcagtattttttttaacaatctcagaaacaacccagaccaatgtgaaaccaggaatatgaaccactcccctgttggagcactcacacccataggtctccacagccaaaccacagggtgtcagattattttgttactgtctaccaaagggaactcttgctggaattctggtatttcattaatctgccccgatttcagtctaaaaacccttgacagagtggatccagcggccagcctcggctattggaagtgctaaaatgcaaatgtgcaaaatcctggccaagctccccatcccccaggaaagtgcttccttacagccgggcctggaggggaatgtgaaaaagagggcttgagctgccctcctcctctccacccggaccctcgctcacactgggagattcagtatgcatgactgagccggcaagcacgcaaggacagcgctcttttaacttttctcaacaatggcttcagtccttccaccttcacatcctccccacacccactctcagggtaaaaaaaatccatctttcttgcccacgtcgtgaaccacttttcaacatcacctctagatctcattttcacccaaagaaaaactggccactcggggaaactgtgacttacatacaaatctggttttttaaaaagtttcattttgttcaatttctttaaatttccacgttgttgaaagtttaaagccaaacattatataaatctccagtctaatcacatttctagaaacaaaacatgtcagtagtaaaccttatacagaataaaattctacccatgagttgactcacccccacataggatgcaccaaactccaccttgcgtcctcttagagtatacaaacaacacctcctaccttggcatgtacccaagcacacaatgccttaaaaataattcgcagatacaaggctgttgttttttttttttttttcaaaaacatacttcatatttcctcttttattatataaatatcagtttaaccttttactgtaagaatataaacgttttaagaggatctttgttattatttatacaaattcacaaacagtacaattaattgataaaggtctctgggtttctttaactccatggtcttgcatgttgctgtggagggttctaaagaaataacaacaaaaatccaacgaaaatatacatcctactcagaagtgatttctttaaagccacaagtcccaacccccaccaaaagaaagaaagtcatctattcctccatttagaaacggaattttttaaaacccacaaactcccattttgttaatagaacagagataagatatgagcttcatcacagccccaggggctctgcaggccagctctgctcctgtttcccacaggaagccgcactgtgtgacctttttggggggaaacttggaagagggtgagggtagggcagaatttgcatatataatcatcattttcaagacacaatctgcatctccaacaaaaacaacggttcaactctcattgctcccacatatttgtgctataaattaagatttagaaataggtcctcaaatcccaatgaacaaggagaaaaaggaaattatagccagaatgtggaagtggggcacactggacggatggaggctgggaagaagccaacacaaaaagacggacaaacccaagggcatctttccagtctaggcacaaacatgtttcagtctcaaaatatctctcttgtagaattccagggcttcagaaaaaaagtaaactaaaacgaggtagccagacatatatatgtatatatatatatatataatttatatatatataatatatagaatatattcagcagaaaaaaggaccatgatttcaaattttttccaaaaaaaaatttttaaacaggaaagaagattaagaacatgaaatgagcatgaatagcagagtactgtaagaggaggagtgatgagaagagactgggattagttacaaagtggaagggtgaaaaggcctttgtagctgggtttgctttttatacatttcaaaataaaaaccagatcacagtattcaaatgaaagctgaagtgaaagcagacattttcctcaactccccagggttgaaaagaccagtcactccccacccccatttccagtcacagcagtggggatacagtagctgaatcagtcctccaccccctgcaggggagtgggtgggtaagcagcagagtccatctctccatccgcggggaaaaggagctgggagtagggtagggtaggaaccccagctgcaaagagaatgggctggaagccgggagggggctggaggagggaggaggaaacgagcctgaggcttctgtcatagccccatctcatccgctgcaatgatctgtgcgtaagtgtgcgtgtgagtgtgtgggggcggtggtaatgggaggatgaacagggcgggacaaggggagctggtgctgccgccctcacctgaccttctcactgtccgtcatctgccagagtcccaggttgagtaccttgaggcacggcagctgcgtgatgcgctccaggccgcgcttggtgattcgggtgcagccgtacaggtctatgccggtgagttggctcaggtgctcagcgatcagctccaggcccttgtccgtgatgcgcacacactgtccaatgttgagcgtgcgcagcccgtgcatctgccgcaccatgcggttgatgccatcatcactgatgtggcaggagcagagggagagagacttgaggccatccagcccctgggctatgtaagccagactctggtctcccaccttgtcacagaacgaaacatccagccccgagaggcgcaggctgcccatggccagatgcatgatgcccgtgtcactgatgttgtcacaggagcgcaggttgaggctgcgcaggctgcccatgtgcgacaggtgcaggaggccagcgtccgagattcccccacagaagctgaggttgaggagcctcaggcccgtcagccctcgggagatgtgctttagagaaagatctgtgagcttctggcagtcctgtagcgtgagctgctccaggcccaggcagccctccgccgcgctgcgcgtcatgccggccaggtgcccgatgcccacatccgaaaggtggcggcagctgcggaggttaaggctcttgaggcgctgcagaccccaggcgatgagcagaaggccagtgttggtgatgttgctgcaacctcccagctccagcacctccaggcccttgaggtactgggctatgcggcccaggctgctgtcagtgatctgcttgcagaggctcaggttgagagcgcgcagggagccgatctcctgcacaaacgcgtggcccagcccgttgtcggtgaggttgtagcagccgctgaggttgaggctctcgatgttggccatgccctggatcacgtagctgaggctgcggcggaggctcaggatctgcacccggcggatgccccgggcctgcaggctggggaacagcgacgggttggcccggcgcaggtgcagcttggcctccaccccccgccacaccgacttgtggtaggcggcgtcccgccaggcggtgcacacctgcgccgcgcgccccttgtcccggacgtccaggtagccgaagatcatggccagcagctccgggaacaggcatgagatgtgggtctccatcttcctcctcccccctccgcggcgctggggggaggaggcgcgggccccgccgctccggcctcgggcaggcgacgagagcgcttctccccagccgccgccgccgccgccgccgccgcctcgggcccaacggccggcccctccccgccttccggctccggccgccgccgccgctcctcctcctggtccgtccgtccttccttcctgccggctgcgcctccggcccggccctcccccgccccgggctccgcacggcgctcacatcccgggcggggaaggcgcctcgctctcgctcccggaggccggccgccgccgccgcctcggctctacccacgccgcgcccgggccgcgccgctccgcccgcgccgccgcgcccacgccccctgccgcatcctccgcctcctgccgccgccgctgctccgcgggccggcgggcggcgagggggccccgggggccgggcgcacgggctccgggcgcggaggaggcttcctgctgcctttgtctctcgcccgcttttcaaacctcccagccccgggccgcccgcactccgccgcccaggcggggggaccaggaggccaatcccggccggcggcgtgcgttccttctcccccgccgtccgcggccacttgggagctgccggcccccgcaccaaggacgccgcggccgtccggccggagcgcggctcggcgcagaccccgggcgagcaggcgggccgtgcgtttggtagcgcccgggccggccccggctccgccgccctgcagcgcgtcccctccgccgctcccgctcccccgcgcccgcgcaatggtacgggcctgcgctgccggaactgtggagccgttgccctggaaaccgagttcggcctggtcccgtggcccctgatttttaaccctgtgggcgccacgggggagcggcagctgtcagcagagcgcctccccacccggcttcttttcacccggtagcccgttattgagccgttccctctctgggccacgccccagccccgttccttctttttctttgctgttgaagtctgcgcagccccttcccacagtttacccctgcaattcgttacccttatttcacacccctctcccttgattatccctgcgagagccgcctcctatagcagtgctcaataatcgtcaccccaactctccttttcttactgtccctaatgccccttaacgcctcattatcacaccccctgctcccccggttggggctgtttactacgacgcctttctctccagtcttgtgtcttaaattggagagaaactcggctgtactcatcttaaacaatgaccccctccagtcggtgttctagaaatttctagaattatccatgactacttccttctagcatcttctgatggtttccagacacgctgtgtgtgtttccctcggtacttgatacatcaaaacttccctctacttctgaacgctgctgcgccaccaatgccctcagtccgctttgcttacaggggaacagccttcccctaagccttgttttaggagctttctccttgtcatcagccttagactatcagttgtatggctcagttgtactgatagtcaatatattcgtatatgctgaatccaatttactttttgattaaaatggaatgacagttgaacttggtttaagacaatccagtcgtgtctgttggtttatcaaccgttttatggaagcagggcacaattccattctaggatgtagcccctgggtcctaaatgtccgtactaaggatagaatttcagaagtttcattttaactacccccaaaccaagaatttttggatcagagaaaatgatcctctgtattttaatttatggatccacacaactagatacaagaccagcggatttatcagaaagggaaaatggtttcattgattctttgaggacctgaacaagatttggaaggggttccatattcagtgtaggagagtaacttttgcccaagcaaccactattagaccaaatacatacagattcagtaataggcataatacaccttttacacccctaccactcctctttcctaaatcaggaaatgcagaagcaaaaattctcgccagcttgttacctcacccacattacacgcagtgtggagcccatagatttttataaccttcttgaaaaaatagactgtactgttagtcatccagtacatccagatgtacggtggcagtaagtgtcacgattctggggtatgcctgggcttcactcttctcctggaggttatctaggcttttattcttctcagtcacttctgcctaaacgtttaccttaaattctgcgcaaaagtcactttttgattgttctgtgcacctagatgtgtttgggttgatgtcaaggccttaatccaaagcaccttagtgtaacttaatcctgcttaataaaaaacaaagtaccccacacatttggggggaattttagacaaggggcctgaccagcctcggactaagaaggagcctaatggttttccttctctagaaaggcccttgttctcaaatctgaagagtcattcagaggtatctggaagcactttctctagaagttggccatctggtcctcgttctaacaacagtttttcttgaattctagaatcttattaacacaaagccttttatttaaggcactcaagtatatattataaggattttcagcaatatgactattttcaccttcaataaataggaaaatatagcatcaagaagcatcacagaaaaagcattcccggggaaaaggaactagggcgtagaatgagccctatgccgaatctgaacacctggtgactttatgctactgaggaaacgactctcctttctgggtctcggtttccttgtgtaacaccaggatgatttgactaggtaatcttcagggacctttccagtaggaacactctgaggccaagagcctagcatactgtctccttaacccatggaacaattacacattgttcctaatgcaggctccagatattaagaataacttcgaatacaataacttcctgggagctttggtttatgctcagacttaggacacaaaaatatatgaagaatatgtatagacaggagactctgattgtctggcaaagatgtataccaatgtagaaaatcctgtggcttgctcttcatatttttaaaactggttgagatttttgtatatgatttaacaagttgcaaccataagttttttaactagcctatttaaaagcagaaatgatagccttgtgtagggagtctctccaaagccttacaaagaattttttttttaattctagatttttcagatggaatgtgcttttcacctgggtagggtgggaaaattgagaggcccaacccaaagatcaggcttacctaaggattcatactttctccttcagaaggggaagacctggcaggaaagatcagaagagctctgtagcttttaactcctcattcaagtatatatatatatatatatatatatatatatatatatatatatatatatatctccaaaaatagtggcccagagtctagtttatgggttgggtcagaggagttaacataggccgggcaaagtggctcatgcctctaatcccagcattttgggaggccgaggcgggatgatcacttgaggccaggagttcgagaccagcctggccaacatggtgaaaccccgtctctactaaaaaaaatacgaaaatattagccgggcatggcagcacatgcctgtaatcccagctactcgggaggctgaggcatgagaatcgcatgaacccaggagacagaggttgcagtgagctggtactgtgccactacactccagcctgggcgacagagcaagagaccttgtcaaaaaaaaaaaaaagttaaaatattttgtgtctattttccttgaactctagtgtatctatggcacaatgcctgctatgtagtagacattttgtcagtgttgttgaactgaagtgaatgagatggataatataaataataatctctttatgaaagacttcatacatatcgaaacttcttcgagagttctgggcagccattagtaatctgaggtttataataaaatgctgcctttccaacttcaaggtttcttgagagtaacattcattctgttgctcagtatttctaagtaggagagcatctctctcgacacttcttcgtgacagaatattaaagataagagagggtgaggatttgattcactgattgcaaataaaagatttaagcagaaacaacaaccaaaaaaagcccaatttaaaaatgggcaaagggtttaaatagacatttctccaaagaagatacacaggtgatccacagcacatgaagagaggctcaacatcattagtcattagggaaatgcaaatggaagccacagtaagataccacctcatatccataaggatagctactattaataaaacagaaaataacaagtataggtgaggatctggagaaagtagaatcctggtgcactgtgggtgagaatgtaaagttgtgggccaggcacagtggctcacacctgtaattccagtgctttgggagactgaagcgggaggattgcttgagcccaggagttcaagatcagcctgggcaacatggcaagaccccatctctcttataaaaaattgtgcagctgctatggaaaacggtatggccatttctcaaaaaattaaaaatagagctaccgtatgattcagcaattctgtttctaggtatgtacctaaaagaattgaaagcaggggttcgaagagctatttgtacatccatgttcatagtaatgatattcgtaataccaaaagttagaagcaacccgaatgtctattgacaaatgaatggataaacaaatcatggtatatactcacaagggaatattattcagccttgaaaaggaaggagattctgacacatagtgagacatggatgaaccttaaggacactgtgctaagttagtaagccagtcacaaaaggagaaatactgtacaattccacttatatgaggtatctagagtagtcagaattatagaaacagaaaaaataatcattgctaggggctggggagagggctgatgcagaatggggagttgtttaatggatatagagtttcagttttacaagatggaaaagttctgaaaattggttgcacaatattgtgaatatacctaacacttctgagctatgcacttaaagatggaccaggcgcggtggctcacgcctgtaatcccagcgctttgggaggctgaggcgggcagatcacctgaggtcaggagttcgagaccaacctgaccaacatggagaaacctcgtctctactgaaaatacaaaattaggcgggcgtggtggctcacacctgtaatcccagcactttgggaggctgaggcaggcagatcccctgaggtcaggagtttgaggccagcctgaccaacatggagaaacctcgtctctactaaaaatacaaaattagccgagtgtggtggcacatgcctgtaatcccagctactcgggaggctgaggcaggagaatcacttaaacccgggaggtggaggttgcggtgagccaagatcgtgccattgcattgcagcctgggcaataagagcaaaacttcgtctaaaaaaaccaaaaccaaacaaacaaaaaaaggttaagatgacaaattttacgttgtgtgtactttacaattaaaaatttaaaaaagattttagcaggacaaacattttgaaataaagatagaaaaaaagagagaaaaataggtgaaaagtattcttacatcaacagattgccgggaaccccctgagatatttgagatgttcccccaaattattagcttgctgtatcttgtaaatgtaggcttaggatcatctttatccactaccgtaaaaataagggcttgtgatctgggtagccagagccttcccgtgagggtgaatgtgtgctatattgtccacactgggaaacccacggaggtgaaagggggtgctgtactattagtattcacgcccgatggatggtcacgcccttttactcttgaaatcgggttgccatttgtaatttgttatttgcagcttttgagtgttaactataataggtgtttttgtagtttcaggcacccaaccaaagaatcagaaatacggtaatagaataatctcagatatcaggtattgtttgttcaatgttgacaaacaccttaggtacttgttacaaaacaggtagatagaacaactctaggaaaataaagtgtgttgtaaatgtagccatttccaggtcaccgaacacttagaaagacgggttttcaatttattcaatcattcaggctgggcagggtggctgtaatcccagcactctgggaggccagggtgggaggattgcttgatcccaagagtttgagaccagcctaggcaacatagcaaggtcccatctctacaagaaataaaaataaaaataattagccaggcgtgatggcatgcacctgtagtcccagctagtcaggaggctgaggcaagcgggaagaccgctgggccaggaggtcaaggctgcagtgaactgtgcttgcccccctgcactccagcttgggtgacagagccagaccatctctcgagaaaaaaaattcaggaaaatattaatacaaattatatacattgctctgtgctatgaaataaacaaagatgtagaagattacgtttttgcctttaagaacttgggatccagcaggtgagctagaaaatacctgtgacagtgacagtatttgttagtgttataagtgccagcagagtgatagaaataaagttctcagtttggaggatccatagtgaaacctagaatttgaataggtgttgatgggaagaatgtcattacattatagtggaaatttttttagagaataggctgaagttttatattgtttagaaaaaaataagaacattacaatagcaaccatgtattgtcatacattgttatggatcttccatattgaggcatcagttaatctaaaaaatctaaaaaatcactttcctaaagaattcttggcttttatttttcccaagaataagagatctggctgggcacggtggatcattcctgtaatcccagcatttggggaggctgaggtgggaggatcacttgagcccaagagttcgagatcagcctgggcaacacagggagaccctatccctacaaaattaaatttaaaaaattagccagacacagtggtgcgcacctgtagtcccagctattcacgaggctgaggtaggaggatagtttgagcccaggaggtcgaggctgcagtgagccgtgatcacaccagtgcactccagcctgggtaacagagagagagaggagagagagaaaaaagagaaacctttaactcttatgtatctggaattggaaattcagtatctgaagtcagaaaattttaattcatggtctggactttgcaactgtttttacaaccgagattgcctcaaaaaaaaaatttgttttagtcagctctctcctcatttgccccattcttctctctaacaatagaaccagacaaggatggaaaaagagggaagttcagggtgtcctgcctgtggcgtccacgtgtgactctcccctacgtgcccgtgctttctgttcccattcccgtgagctgcgttcacaccatacttggagtctgaagctgtgtgtttgaatccttgccctcccactgtagtctgttgcctgacctatggcaaagtcactcaattctttgagcttcaatttcctcatctataaaacgaaagtgattgtcgttcacggagctgtggtgagatgcgttaagaaaacatccacgagaaaggaagggcctagtgcatgcccggcacatagtagggacctagtaaatgctgtttttgtttttttcttgtataaagatgcactttgaaaaagaaaaaaaaaaacccttacagatgtgcctcagaattatacagatgtacatttactgacagtgacacttttttaaaactgtacttcctgttttaaagaaatgtgcaggttcgaagctgggcgcagtggctcatgcctgtaatcccagcactttggcaggtcgaggcaggcgaatcacaaggtcaggaattcgagaccagcctggctaacttggtgaaaccccgtctctactaaaaatacaaaaaattagccaggcgtagtggtgggtgcctgtaatctcagctactcgggaggctgaggcaggagaatagcttgaacctgggatgtggaggttgcagtgagcgagatcactccactgcactccagcctgggtgacagagcgagactctgtctcaaaaagaaaaagaaatgtacaggttcaaggactggaaacataacaaaagcgtaggcgcataagagaatgatctttcaggtagagccagccatgtgtttgcatcttatcttctcctctgtaagtcaggaagggtagcatgttccattcatgcgcaaagaaatagtccagaactcctcttctgccagacatccatccgtcctgtggccttggacctatggtttcactaccaactcttactctttcttttttctgagacagagtcttaccttgtcgcccaggctggagtgcagtggcgtgatctcggctcacggcaacctcctcctcccgggttcaagcgattctcctgcctcagcctcccgagtagctgggattacaggcacctgccaccacgcctggctgacttttgtattattagtagagatggggtttcactatgttggccgggctggtcttgaactcctgacctcaggtgacccacccgtctcagcctcccaaagtgctgggattataggcgtgagtcattacgcctggcccaactgttactctttcttttgcttagcgtggtgattctgaagcttgactaggcatcagaataaacttgagggcttcctgatgcaggacatctggggagaggcctgagaatttgcgtttctcacattgctgtcagcatcacctgggaactggggatcacagaactgagaatcgctggtagaacctcctagtacccaccttttttttccttctttaaaacttttgttaaattatacttcttaaaagctctctcttttttggcaaaattaaaatcctgtaggacaaaactatagtcccccgcccccctccatcttctgtcgtttagatcatgagctcctctgatacaaaggttgaaattttctccagtggtatggtggaaagaacttaggttttacagtcagatgaattctaggataaaatcttgactctgtcacttattagctctatgactttggacaaattatttaaccactaagaggctccattatctcatctatgaaatggaactagtgatttccaaatcttgggagttttgtgagggttgactggggtaatgtgtgtaacctcctagtatggtgacagaccgtaatgaaaacagcctaatgtttacagagcattgattgagcagtaggccttcttttaaggtctttacatttatgaacttccctaattgtgacaacagctcattttacagcctatgaagagggttcattactatctccattttacagatgaagaaagtacagcccagagaagggactggctcaagaccaaacagctggccgaactggaatttgaattctgtgatctggatctagagcccatatcccagccaccatgctttgctgtgttaacagtataagtttagcagtccgccttgctaggatgcagttactctatgatgccacgtaaagagaggtccatgacacagacagataaatgccacatgttctcactcatgtgtgggagctaaaaacaactgagctcatagaaacagaagtaggggtgaggcactgtggctcacgtctgtaatcccagcactttgggaagccaaggcgggtggatcacttgaggtcaggagttcgagaccagcctgggcaacatgtggagacccccatctctacaaaaatacaaaaattagcctggcattgtggtgcgcaccagggatcccagctactctggaggctaagatgggaggattgcttgagcccaggaggtcgaggctgcagtgaggtatgatcacaccactgcactctagcctgggtaacagagggagaccctgtctgaaagaaggaggctgggaagtgcagcagggaggggagggcaggagtaggttggttaatggatgtaaaattacaactagacaggaggaataagttctagtgttctaaagcaccgtagggcgaatatagttaacaatttattttatttgttcaaaaagctagaagagaggattttcagtgttcccaacacaaagaaatggttttcgaggtgatggatatgctgattaccctgattggatccattacacatagcatacatggatagaaatagcactctgtgctctataaatgtgtacaatttttacatgtcaactgaaaataaaaggaaaaaaagatgtgcaaatatgttttgagatctttaaagcgccatgtaaatgtgtggtatgttttgcttgttaggagtactgctgtcccattatgtatttgaacaactcctcataaagtacctttggcttggggaaaaaaaagagttaacagtgagtgtcatattgaccatactgtgagcaggatctggtcacggtgaggcatggtgatcatggaagacactcgaaggctctggttggtttgctagccaaaataggtcagagtgtgtgtgtgggggggggtgagagtgtgtgtgtgtgtgtgtgagagtgtgtggggtgtgtgtgggggggtgagtgtgtgtgagacagtgtgtgaggggtgtgtgagtgtgtagggtgagtgtgtgagagagtgtgtgagagtgtgtgagagtgtgtgggggtgtgtgagagtgtgtgtgggtgtttgtggggggtgtgagagtgtgtggggggtgagtgtgtgtgagtgtgtgaggggtgtgtgtagggtgagtgtgtgatagtgtgagagtgtgtgggggtgtgtgagagtgtgtggggtgagtgtgtgggaggtgagagtgtgtgagagagtgtagggtgagtgtgtgtgagagtgagtgtgagagtgtgtggggtgagtgtgtgtgagtgtgtgggggtgagagagtgtgtgtgagagtgtgtgtgtgagtgtgtgagaaagtgtgtgtgtgagagtgtgtgggggagggtgtgtgtgtgtgagagtgagtgtatgtgagagacagagggtggtgtgtgtttgtgcctgtgtgagtgtgtgtactgcagggtagatatcctgatacctgtttcatgccttcaggcccacagctggctgtggcctcgcaggaccaggaatgcgtttgtgtgtaattatgtcaccctctagcggtgacttccctactagccctttatccttgaaaagcccactcgggtgtcggtgacctctcttcccagtgacagcccgggagcagaacttcggggagattctggcatggagggacagtgctgggaaaagcggggtgtggccgggcatgaagagagtgccagggcccgggaagagtgaaaagtacaactaggactaatgaggagtgcaccctgccgagcagaaggggaagcaggagcgggccaggcacagcgtctggagaggagggaagagaaggcgctctcaaggggaggctcttgcgtgtcaatttctgccaagtgccattttatgtctgtggggtgggacggttatcgcagctagagctctttccagaatgtcagcactgagggccgaagtgggcgtggagaagcagtttcaattctgttttccaagggaagtaggcacaggtttagaggctgcctggagctgcctaaattccaaacgttcaccaccgtggagtggactgctgacttggctgcttctgcctagcctggggctctgttccctctgccagtaaaggtcattttatcaggatcctcagaggctttcgcatgttgataaatatttcaaaagacaagggggaatcaagatcagtcttactgagagcggatttggaactccgcgttcggcgggacgctgccgcccgaggcctgactgagccacagtgcgaagggtgctccctttttgaaaaggtgctggcgccaggccaggctttgctggaaagtcctatctggatgagtcagagcatttacatttcttacataatgtcagacccagaggagctttagggatcagcccagctacagagttcacagccaggtccccttttctgccaagaggatagggttaaaggttttaaaaaaaacaagcagagtctcaaggggcagaaaagcgaaggctcagagttaatgctgattaactcttcacaccccagaaaagatggttctgaggtaaaaccacacctttatgtcacatgatgccactgccttcctgaatccagtcattcctaaagaggtcagtaacaccaagcactgaccttcccgccttgtgtgcaggaaattaaagaggcatgaaaaccctgtccacattttctctaaagttggaacagcttgcctggggcttcagactgagcttcaatctcaagcttcagtgagattctttgttgtttattttttatttttaaactatttggccaggcgcggtggctcacgcctgtaatcccagcactttgggaggccgaggtaggcagatcacttgaggtcaggagtttgagatcagcctggccaacatggtgaaacctcatctctactaaaaatacaaaaattagccagtgtgatggtgtacgcctgtaatcccacctgctcaggaggctgaagcaggagaatcgcatgaacctgggagacggaggttgcagtcagctgagatcgagcaactgcactccagcctgggcgacagagcaagactccgtctcaaaataaacaaacaaactaactaactaactaactaacttactattgaaggccaaagagttcaagtaactaacataagaaatcagtggctactgttgtaaccatcaagaattctttaatgggccaggtgcagtggctcaggcctgtaatcccaacactttgggaggccaaggcaggtggattacgaggtcaggagttcgggatcagcctggccaacatggtgaaaccctgtctctactaaaaatacaaaaattagctgggtctggtggagcacacctgtaatcctagctactcaggaggctgaggcagaattgcttgaactggggaggcggaggttgcagtgaactgagatcacgcaactgcactccagcctgggtgacagagcaagactctgtctcagaaaaaaaaagaaagaaagaaaaaaaaaagaattccttaatttccttaatttaactggttcagggaacctaaatgagagttgtcacataatagcaaatcttagtgaccagatgacactcaaagcaggtgtaaatatttaacaaaagcactgtgtagacatttaatgacaatggttgctttttgtttgcttgctttttatttgtttacaaatgaaaataaagcagagaatgagaagtcactttctcagggtcacgggaacaattcaggttgaacgcatctctcctccgacatgccgagcgtctttgagtctcctcacccaggcgcacactcaggattgcagtcatctgctattgttgcctttatttattttgagacggagtctcgctcttgtcacccaggctggagtgcagtgatgcgatctcggctcactgcaacctccgcctcccgggttcaagggattctcctgcctcagcctcccgaatagctgggactacaggcatgtaccaccacgctcagctaatttttttttttttgtatttttagtagagacggggtttcaccatgttggccaggctggtcttgaactcctgagttcaggtgatccacccgtctcggcctcccaaagtgctgggattacaggtaggagccactgcacctggcctattgttgcctttttacttgatatttcaataaatttgtgagcaattggaatggtaagaaattcgctgcagtacataaaagtttgatcacttagactgctgtgtgattagggttgctcagtgatcttccggcaataaagggaggaaaaggagaaatttcagatggagtgatgatggatgtcctcaggcatgtcaatggctgctgaagtgctatgggaaaatggaaaacacaatctttgggatccctctttcagccattttcctgcttttatatctataaactttaaaaagtagggcatactttaaacaatagtatactaagaaattgtcaccgctggcagagccaaaattgaatcagcttgccttgtgattacatcagaaatgtgtcttagtctgtaaagcttcactacaggaaatgcccaggagctgctaataaagtttaatacacatttgcttccttaatgctatattaacatcctgaccatcacaactttcattgtaaacctattgcttattaaaaacaccctgtaagatgtcacaaactgacagaaagttggggctactacatgaattaatatgctaactagtatttttcagtgttatatagtataagatagtaagtgcttgaaatatgagcattttgaaatccttggccagcataatcccatgggtaacactgaattatccatggctgtgggagagagcaggtggttcacttccaaccatgggttgtgttccaaactaagggtttttgtttgttttgttttctttcttttaaagaaaatcaagtttatttttgaaactgttcattttaattctaagacaaagctagaaaaagaagaatggaagatctggaaaaaaagcattgtcaactgtcactgtcctaccatgggaaagaaatgtcttacaaacggaaaaaaaagttggagagaacgagaagtttctggtgttatgtaagaggaagcgcccagattacatataaaagtcaactgcttcacgccctgttactaaatattagggatgcaaaatacgtggtggcagtaagtcagagcctggtttcctaaatatttcttacatgttagggatcctgagagatccctaaacaagtagaaaattcttttttttttctttttgagacagggtctcactctgttgcctaggctgaagtgcaatggcataatcatggctcactgcagcctcaacctcctgggatcctgggctcctgggctcctggggtgatcctcccacctcagcctcccgagaagttccactacagccagccaccacgcctggctaattttgcatttttagtagagacggggtttctccatgttggtcaggctggtctcgaactcctgacctcaagtgagccacccgcctcgtcctcccaaagtgctgggattacaggtgtgagacactgcgcccggccaacaagtggaaaatactatcctgaatgagtgtgtgtgtgcctgctgggagaatatttcctagtgtttcctagatccttgttagttgacttcccacccacaaagccccagaaggagtaaactgtctctaaatatcagaataaacaacaacaataaaacaacttttatattttcatttctttttctttttgttttgttttgttttgttttgttttgttttttgagacagggtctcactctgttgctcaggctggagtgcagtggtgtaatcatggctcactgcagccttgaactgctggtctcaagcaattctcctgccccagcctaccaagcagctgggactacaggcatgcgccaccacacccagctaattttaaaattttttgtagagacagggtgtccctatattgcccaggctggtctctaactcctggtctcaagtgatccacctgcctcagcctcccaaaatgctgggatttccggcgtggacctcactgcccagctaaaacaacttttaaaaggtatattagagatccaactagattctactcttgcatttatctgcagcatatcagtttggtttgcccatggttaggtggttcttggtctgggtcttagtttcatgcgtctatgcatatgtggaaactcatcaagctgtacatttaagacttgtgcgttttaactctgtgtgttttgtttcaattttaaaaagtttttatttatttattttttaagtcagaaggggtttaatgggtcaagaaaagtttacttctgtgcacacaaattatctcaaggtctgtttgttcaaacagggtaaccaaacagggaccgattctacagtggctgctgcccggagttttacacagatgggagcatggccgtacccctgaaccctccaaccttctcttgcctgtgattaccactccttccctggccttttctggcctggctgctttcactgctgaagtagggcaaggattttgtttctcttcattacccttcaccttgccaggcctctgttcatcccatccctcggcccctagtacaaagtatgcagttagcactccataaatattgactttaattttgattatttttctctggttaatatgtgttgggggccgggtgcggtggctcatgcctgtaatctcaaaactttgggaggccaaggtgagaagatcacttgagcccagcagttcaaaaccagcttgggcaatacagtgagatctagtctctttttttttttcaaaataattaaaaataaatatgtgttggggtgggcagtgagtgcgggaaagaagggggaaagggagattgtttctaatgtacagacggggagacgtctggggctgcgtaggagctggggtgaagagcacaaggcattctggttttgcctctgtatttgataatgttttcttaatgttggaaaaatgcaatagttttatcatttgccacataccttcccatgctgttccctactgaaccaaatcaggtcatattatactggctatgttatactgcgctgttttccattgactttttggttattgatattggcttttagtgttgggtgtgtggtttcttttcacacaaacatgaatacgttgtaccactgagattttcctaggggttcagtcattttgagttggagatggtcattgggatgcatttttacattcctgttctcactttctttttttttttttttttttgagacggagtctcgctctgtcacccaggctggagtgtagcggcctgatctcggctcactgcaagctccgcctcccgggttcatgccattctcctgcctcagcctcccgagtagctgggactacaggcgcccgccaccatgcccagctaattttttgtatttttagtagagatggggtttcattgtgttagccaggatgaccttgatctcctgaccttgtgatccgcctgcctcagcctcccaaagtgctgggattacaggcatgagccaccatgcccggctcctgttctcactttcatctgtgggtgccacccagagcataggctttctatggaacagtgaatgtgcttacatatgagtagaagaagcgaggtttttcttatgcagcccgggagacaaggaaaccgctgtgatgccgtgtgccaatagcatgcatttatttgtggtatatcagagcctcagatccagccatcccagacagtcacgtccacaaggatgagacccttttgcaggagacagagaacacacctcccttattcctgctccagcagttgagatctgctggagacccttactcatgtttcctggacttgaactttaggacactggccactgggcattttttgcagagggtactcattagaatttctctttctgtcagttttttagcctattttttaagctaaatttctaaatgcttttgaaaccaacggtgttgttttattttgctgatagaacccagatgcgaggagggagttgtttttttttttttccttccatcatttgaatcattgcacaagcaccgtatcacctagaaacagagggtgatttcaggacagtgctgtggccacaaagcatggttaggtttggaaaagcagcagggaaaaaaaaatgccttctgattcaacacttccgttctatgtgatttaagcacatatctagttacaaggtttctttggcaaaaacaattttttgctctggagttagccaggcaaagccagcgtccccctggccagttgagtttgaggaccatctgcctcacacatcattagcagcattgtttgtttagggcccttctgtagaatctttattcatggagaagtagaagaaaactcaaacagctcagctggatttccaggtcctgcgtggaatttgtaacccctttgacttctcaactgagaaaattggatgcggctgtcacagaaagagaataaatacggaaccccacaatgctatgcttgcagccacttttattccattgaatttcacacataatgaaaggcaggcatactctgagaggcacggagctgaaccagtgctgggagtcctgcaattccaagtaggttgagctggtgataattctgggcaaaatactttagtcctctttagttggccgctggctaaagcatgcgggcagtgatacggctcctgttatcctactgcgagtgttctgcttttagaactaagaaaacggtgaaagaggaaagacaagtgattagttaacacctaaaagatgtatgccctcacgaataatcaaagaaaggcagtttaaaatttgatagcattttttccctattgtgagaaagaattttttaaaatgataatatccaaacatcttaattagcttttgtcatttaaagctaaaacccagtttagtgttttattagacttgactttcatgaaaggttgggaattctaaaaataacttattttgaaagagtaatgaatggcccaacaaacttaatggtccagttcaagctattggttgactggtcaatagatgctagagaagttaggactggaaaagacgttagggcttatgtggctctgccctgtcattttctaactgagaaggctgggacctagagacgttgtgtgacttgtctagggtcacacagttgtacggaggctggaattgcattagtaaaacatgatgagttgttatttagatcttgctctcagcaaatagcttcatataggattaaactttttgttttcaatacctcaaggatgttgagcttccctgtctttccagacagacaggatgtccgagacctcaaatcaggcactgttgcctcatttattctttgtccttagatgaacgagtggctggatacctctacatctttagaaaaaaattttttgagatacagtcttactctgccacccaggctggagtgcagctgcatgatcgtggctcactgcaacctccaactcctgggccaagcgatcctcccacctcagcctcctgagtagctgggactgcaggtgtgcatcaccatgcccagctaatgtttttatttttgtagagataggggtctcactgtgttccccaggctggtctggaactcctgggctcaagtgatcctcccacctcagcctcccaaactgctgggattgcaggcgtgagccaccacatccggcctagatctgtttaatggggataataatcctggcacaattgatgtccctttgataatcttgaaaccccttgagcaactacaaataaaaataaggcatgtacagtctaaaagggggataaacgtatataggtaagtctaatacaaaacagaataagtgttgtaagaggttgtattagttaaggtcttgaggttcctgtaacaaacaaatctcccaaatgtaaattggctctagaatcatagaaatttatttctagcccatgtaaaagccaaaatagatgttcattattatcaggcaggtctccctctggtaattttggggcttgggcttcttctgatttatcactctacctttggcctggttttgaaggccaccatgcttgtctgcatcaagctgaaagaagaaaagcgagcttggaggtctcctggttggagatttttagaggccaggcctgggagctgcagacatcacttcttctagtatacctttagatagcacccagtcatatgaccacctctttgtgcagtggatgctgggtaatgtagtccagcggtgtgcaattttagtgaccatcaagtgatctctgctacaatgggctttgagggcccaaaggaggaggacgtcatatgagagtgaagtaacttattggacaaatacacacatgcctaggagggtggaaataattaataattatttctactattaaccgtgattttgtcttaattttaataagagggttatatatctcttacatattacagataatcttcaggaatcttaggaattcctaaatttatcctaatatttaggaattcctaaattcctgaaaataaggtgggatatgtatctcaatttgtttgtattttcaggagtggtgactctttctgatccatggcctgtgcttacaagatagccggatcccatggagatcacacctgctccagctgtctcatgcagcttgggaggtgaccacagaaacagtgggccctccccaaagccacatgcggatagactatagtcaggactcttcatctccattcagcagtgaccagaggccagcggcccgaggcctgtgctggtggtttgttccagctgcggacatttgtcatcccttggctgcataaggcacagaccacacctcctcgtctcctttccactcaggctgacagtgctctccttctgccccttgtagtgtttctactgaatcagacctcccagctgggctcccaccttccagatgcttaccctccacactccatccatcattattggagcaaacgattaccagagcttttctaaatccacatctgatggtgcctctcccctgttcagatgcctcggatgtctcctgcagatgacaagagacgcccaaactccttataagggggccccaataggaaggttctgcttcacgaagaattaatgacttttgtttgtctttagattttggctttggttctctctctctctctctctgtctctctttctctcccccttccctcttctgttttctgaagttgaattttggacttgaaactacgtgtcatgtgtttttcaggcctctgtgcctttgctccttgggcgggtctcattctcctatctccagctgtgagaatcctgtgtgtcctcttagggacaggttcaaataccatcacccccagaaagcatccccaccgttggaacgacatagtctttctcagctgtttggatagtaattgatacctccattataacgtattgccctgctaaatgttataatcacatatgtttgcctcacctctacgagattcctgttattcaaccaagagttcctgttactcaactttgagtaagacctaatagatgctcaataatattagttgacttgaattaagagtcacagaaagaattccatttcgattactttttggcattttcactgggtctgaactttttcgtttactctgagtagcaaatttaaaatagcaaacaatttggttctgatcatgggaaattgctctcaaggtcattgcagaatggctgcttttcctaaagattacctgcaatgatggaagtataggttgtcattggaatagaaaatggttgtctccatggctggtaggtggggtcttgctcctgggcggtaggttagagtttgctacccttaccttgagtgccatggtactttgcaagtaactctgttaaagctcctactgcaccacgtttaaacaatggatttcaaatggaactttcggttttgtacaagtgatgatttgtgttcttgcctggcttccactctagaccagcactatgagacagtccataagctctctgtgatcatggaaacgttctataatccgtgctgtccaaaacaatagccactagccacttgtagctactgagcccttgaaacgtggcttctgcaatggaggaactgaacatttaatttaaattcatttttaatttaaatagccacatgtggtcagtggctaccatcttgggcagtgatattgagttcctaggagagtagcattgtattaattgattggaatatcctatacagtactgtgtattgagtaaacctacagtaagcatgtgttaaatgatgaacagttaacatttattgagtgcctgctgaatgctaggtgcttcccagaggctgtccttgtgttaccttcattttctgcagagccccgtgctggggcagcatagacagcaagcttgacccccatcattgcagccttcaccaagaaaacaggcagtcgagggagcaatttagcaagagggtcaggagttccgtgaaaagaagcctggcagagccataaaagaaactaaagaattttggtggtgaaccaaaagcctctgtaacctgcccaggcctgaatttggtgatcatgcttttgcctgaggcagccacagaggttatttaattctcaaaactagggcctgtgagacccacaaacctggtctgaggtttgctagcagggactctagttttggcaaagggaatgtgaactgcttagcattggagggggagacaggagagctgaccaccttggctctgaatgttctcatcggtgaggaaggaactggtgctgtgcctgagtgggcgtgaacttgttttgcctgtggttttctttagaaagctgcttggttcctcttctctcaaaggatttggaaggtcttccccgcacaatcaaaggagcagtttgagacacaggggcgacagctggggacagcattagagggacccacattacttagagctactggtttccccccagataaaaacccaggtgtcgtttctgcatgagcagtgagtgacgaggagaattcgcttgcagcctctccgctacgctctgcctttagagtccctctagccgtggtccctgtgttgccgcttgcccctgggtacctgactgatgaagacaggctctggggctcgccgttgaaggtgctgtggacccaggggtgctgtccttccgctgttccattcattgcaacattcatctcctgcctgtttacaaaaatgaagcaattatcctattcttccaaatggaaactgctaatttttgaagcagaaggttgacagcttcagtaagatctcaagagagcgagaagactggaatcaggtgaggccataacttcttatctaaacttagtttctggggtggaattacagaattgcttagaaaaagagtcaatataactacttgcagaaaataccacctgtaaaaatccagatttataaatggtgactatgcatttagtacaatgattatcatatatgtaatatataaaatatatatataatatgtatattgaggtccctttaaagaacagcatgatgggctggctcatgcctataatcctagcagtttgggaggctgaggcaggtggattgcttgagcccaggagttcaagactagtctgggcaacatggtgaaactctacaaaaaaatacaaaaattagctgggcattgtggcatgtgcctgtagtctcagctactcaggatgctgaggtaggaggatcacctgaccacagagagatcagagctgcagtgagccatgatcacaccactgcagtccagcctgagcaacacagtgagaccctatctcaaaaaaaagaaaagaaaaagaaaaaagaactgcatggcaaatttgaaagtcttttggaacatgacttgtgaatgctccaaacattccaaaatgaatgagtgaagtagccaggagaaagacagcagagagcagtggggatttgggaaagttagagaacctgtgtgccacccaccaagacattcatattccaaagatttgtaaacattgtgttagtcaaagacacttgggctgggcgcagtggctcatgcttgtaatcgcagcactttgggaagcctaggagggaggattgcttgaggccgggagttcaagaccagcctggacaatatagggagacccccatctccacaaaagaatttaaaaacttaaccagacacagtggcttacacctgtagtcccagctactcaggaggctgaggtgggaggatcgcttgagcccaggagttcgaggctgcagtgagctgtgatcatgccaccgtactccagcctgggtgacagtgagacgatgtctccaaaaaagaaaagacagctagctgactgccagttggtgatcctggttttaaaagttgcatggtttccccaggtcctttaaaaatacgctccattttgcaaacacagtagtacctctacttggtagcacaagacacatttttattctaattagcgcatggcatagagagaggttatccacctgcccttggtggtgatccagaagtccatttatttacttcattcactctaagtagacaggaatttgcagaaaacagtagcaattgcacaaataaatgtttttcccctatagtacaataccccagaactctagatctggtgaaaatagattacttgcaggacaagagcatctaaacacccctcaatcctccagcccttgaaaacaaagtccatagccttgttctcttgaaacaattcctaaaccacactgacctgtgacctatacacttctgccttcttttctagagcatattttaaaactattttattagtattcaggagaagggaacttcctctttcttatcatctgcacagaataagacttccagtggacttttgcttgatacctggggagaaaattgtgcttttccaagtaagatgagtcatctgagatctgccatttctgggaattgtacagggacccagagtcttagggatctgctctgcctactttgtggaatttattctcacagtgcatgagttggtcactttcacactgctccaggcaccaggagttggaagctggaagctctattctctggaacatcaggcattagattttagtgtgaaggcctcaggaattgtttctgcgctcctgccaccctgcactgtgattgggtctgttttgctatatacttcccaaattgtgtaccttatcactgggaatggcacacacatttctggggaagggtagtttagcatttttcttaagggccagaatttaaatctcatcactcctaccaagcccccagcccctcccaccaagcccccagcccctccccacccctaagacatttcttctcctgcaagccagagaaacaatgagaaaagacacagaatatttgggagatgaggcttcccaaaggactgctgcaatcatggtggagctgatacaaccctctccccgcccaattttttattttcatttctaccaactgtagattatgcatacacacaagcagatcacacaaaagaatactatgcctcagggctaggaggattcattgagcaaagcttggaaggaagaactagagagaaacctagagacagagaccctcgggagaaataattaaggctggcagggaaaggctgtgttaattgagctgagaagaaagatgagcatccggggattctcgtaagaggtggtggaatttgcagataaagtcattggtacattattggattcatctttggttactactttttaaaaatgttttttggggaagaatgctatctagaaaaaaattcatgcaagagaaacagatagctacagaactaaatagtaataactgaccaaaaaaaaaagtgagacagagggtgattttgccatatcctcatttcctggactgagcaagagaggaagcgaaatgctgagtcggctcctggcgtagcggctgccattcatgtgccgttgatccaggcctggcactgcgagagcaatacccattggtttgcacagaactccctcccaccagccccacctgccctcaaatagtcatcccacgtggttgtctctacctaaatttcccaacatgtttctttttgagtatgaggatcttcttttttaagtcaaaaaataaaaataaaaaaggtcacatgccccatgagaccataattgtactttccgccaagaaaatataatatataaagaccttcaagccattaggtattaatatgacttttttatttttaaatatttttgttgtctaatataatgcagaaaattgcatacagcataatacatgcacaacttaataaactgctgtagtgtgaactgccacatatccatcaccaggttggaaaatagaacattgctggtatcccaggaacttcctcgagccccttcctcatcacagccccctcccttggaaaccactccctgatgtcatcatttccttgcttgcttttctttatggcttaaccaccaatgtgtgggtccccaaacaagatagttttgctatgaatggaaccatagttcatatactttcttgtgacttgcttcttctcaatattatgttcagaagatccatgcatgtggttgcatgtaacttgtagtttgttttccttcctgcataataattctttgttgtaatatatcacagttaattgttttgtccattctattgttgatggatattgttgcttctggtctgaggctatcaagagtgctgctattcttttgttgttgttttttttttttgacatggagtctcagtttgtcacacaggctggagtgcaatggcgcgaccttggcttactgcaacctccgcctcttgggttcaagtgattctcctgcctcaggctcccaagtagctgggactacaggcacccgccaccacacccagcaaattttttttttttttttttagacggagtctcgctctgtggccaggctggggtgcaatggcacgaccttggctcactgcaacctccacctcccgggttcaagcgattctcctgcctcagcctcccaagtagctgggactacaggcatgcgccaccacccctggctaatttttctattattggtagagacaggtttcaccatgttggccaggatagtcttgatctcttgacctcgtaatctgcccgcctcagcctcccaaagtgctggcattacaggtgtgagccaccgcgccccaccctgttattttgaaagttagagaactgccatggggaaattcatttatcctttcaagagataagaatgggacataagatattgcaatttgttagagaaaaagaggtcaattagcaggctcttgtagtagctcatagtatgacaataggaatgttgagtagggaatatattcaaaaaacactatagagatacaatcaagagaccttggcaattgatttgacgtggaaggcaaagaagagggaggagtcacaaaggataccaagatttcaggcctggatacaggaagagaattggaagacagagaacacgcatgattgatatgaaggtgtgtaatcaatcagcattttaacttctatatttggctctctaggaagattcactcaacccacattttatgatcaaaaggacagtatccagggtgactggtcccctatgtctttgaccccattcctgcagtgttgcccccagaaactggaagcatgtcatgatgggagttttcctgggtaattgatgctgaattatcaatgggaataccaaatcagattttttaaaaagttaatttaacatttattatttttagagacctctgtcatccaggctggagtgcagtggtacaatcatagctcactgcagccttgacctcctgtgatcctcccgcttcagcctcctaagtagctaggattacagacatgtgccaccatatccagctatttttttttttttttttggtagagatgaggcctcactatgtcggccaggctggtctcaaactcctggcctcgagtgatcctcccatcccggcctcccaaagtgctgggattacagatgtgagccaccatgcctggccccatattagattttggagggactacataaatttcacgaacaagcaattctgaaaacagtggaaattattgaagtcctccttcattgcactatctctcctcttcttcgaaaagcaccttgaaattttctctttgaccaaaccacatcttcatgtgaaatcctttctgctgttttcctcctgttaaaagccctcatattcttcaaggccctactcaaatcccacatcctgagtacagctgctcccttaggctcttctgacacttctttttttttttttttttttttgagacggagtctcgctctgtcgcccaggctggagtgcagtggcgtgatctcggctcactgcaagctccgcttcccgggttcacgccattctcctgcttcagcctcctgagtcgctgggactacaggcgcccgccaccacgcccggctaattttttgtatttttagtagatgacacttcttatagtgtacttttctgggcaggttttctgttttccccagctagaccaatgcaccttggggcactccccaaggtcttacacatttttacattatcttattaagcagtgccagcctttactcttagaagctgaatgttacttatgtctttgaggaaaagacagagagttatgtctgggaccaggaatctccaaaatctcaattagcagtggattctcagataaggggaggtacagtcaagcagcttcctcacagcaaatggaccaagttgtatggaagtcgaagggactctccttgtcttcatgagaggctggccttcgtggcctgcttcctctttccctgagagccagaggagggcttttcttttctttcagtcaacaaatatttttctagcaactcccacatacccctgtgtactatcctatccactggggagaaaatggtaaataagaccgtttccagagcatatgagggacagaaacaaaagcacaacagatgagcatgccacactattccatgtcacattaaatgctgtggctaaaacatgtgagaagctagaaatagaatgatgctgctgggggccttctttggcagagatggttagagaaggcctcttggaaggtgtggcctcaatgacaaaggagcttgctctgcacagagagaggagaaaccattcccagaagtcggcaaggcacagcggggagaaacaggatgggtttgggtaaggaggtatcaggagtttggggttctaaagcacagcatgaaatcctaaagaggatggaaaggttggcggggccagattctggaaggcgtcatgtaatggggtgaggagttatgactcatcctttaggagataggaaacctttgaagggttttttgttgttttttttttttttttttttttttttgagacggagtctcgctctttagcccaggccggactgcagtggcacagtctcggctcactacaagctccgtctcccaggttcacaccattctcctgcctcagcctcccgagtagctgggactacaggcgcccaccaccacacccagctaattttttgtatttttagtagagatgaggtttcaccgtgttagccaggatggtctccatctcctgacctcgtgatccgcccgcctcggcctcccaaagtgctgggattacaggcttgagccaccgcgcccggcctctttgaagggttttaagcaaagaagtcacatggtcaaatctaagctttgaacagagctcctcgatcgctatatctactgaaaggcaagacagttttgtgctatcgaagtaagagcctttcttgctgaggacatagtttcttggtgagtttcactgttaaggccaatctaaaatgtccctccacgttctctccaaaccttatgtttcttcacgtgcactctgtacctcacctctgcatcttccatgagcccctcacaccaaaccaggatccacccttccagacccatagctcttgacctggtttgtcttttccatcccaaagtaaaactaagtaccaactctttaaaactattatgttttaattcctccagctttaagcagcctggcctgttctcaacccacatatcattttggctaggggagaagtctagttctttccgcccacaaggctgtgtgtgtatctaagtgtgtgtattaatactagtaactttgcatgttttgtaaaccttgctttttgtgatatctcctgcatatcagaatgttgttttctgactttcacactattcgcagccgtagtaacagggcaatggtgcaacgaagaaaagaaagaggctgggtaccgcggctcacgcctgtaatcccagcactttgggaggccgaggcaggtggatcacctgaggtcaggagttcaagaccagcctggccaacatgatgaaacccatctctactaaaaatgcaaaaattagccggtcgtggtggcaggcacctgtaatcccagctactcgggaggctgaggcacaagcatcacttgaatcgggaggcggaggttgcagtgagctgagatcatgccacttgcctaggcaacaaagtgagactctgtctcaaaaaaaaaaaaaaaaaaaaaaaagagaaagcagagaaggtgttatgctctagtgacagggaggacctgtatttggggaagagtagaaagatctggattccaagccagggtcaaccattcaattgctgtatgaacaagtacttaattttagtttccctgttttcaaagtgagaataataatggcatatgccacaaatgttggcagagattaaatgagaaaaatagatgtgaaacatttagtgcagtgcactaagaggtgctcaataaatgttgattaatactagctattgtcactggttatcaatcaaaagacatttgttactgctgagtaaaaccatactgggcgcaaaggggctcgcagagaaagtagaaaaggtaagtttgaacctttaggaagcatttgatctactagagaagtaagaagtatatacttcacctgagaaacagcccaaggcagcataagtggggtagggaggtgcagaccagatacatggattcataagggccgaagaggttgagacctcttcggtctcaacccatgagaatgagattctcatggggtggggttaatcaagcacagttttatggagggagtgaatcttgagcctggatgtgaaagtagtttaatatctggattgctgcagagcagaggagaatgcttccttgggaagaggatcagaatgaggtcttgggggaaaagtggggtttgttctaggagtagaaggacattggaaaaggagacttcatgttgggaaattcaggaaaacaatgagaggtaagatgaggccacattggaaataaagaactgggaaccactatacgttttcaaataggggaatattatgatgtaaaattagtattttagggaaaactggtattgtgtctatgtgcacttgtgagtgagaccacgaagaactactctggtgttcagatgccagaagggtgagtactcacctggaaattgggaaggaaatgagtgaacctgatgtacattttaggaggtatttgtctattgtgctgaggtccataaacagtctttctctacagtacgagaaatgagtggccaaagggagagaagccacaggactccagctagcaaggcctgctcctcctccacctgcccctcccctgtcccatggaaatcatccagtctgaggcccctccttcaacagcaatgcagccaggagttcacaaagggaagcatttcctttccaaagactgctaagatggtttaccctgttatgccaggaatgttaacaaaattgcaaatgtacttttattcttttgttttttctcttttttttgagacggagtctcactttgtcacacaggctggagtgcagtggtgcaatctcggctcactgcaagctccacttcccaggttcaagcgattctcctgcctcagcctcccaagtatctggaattacaggcacccatcaccacgcccagctaatttttgtatttttagtagagataggtgttgccatgttggccaggctggtctcaaactcctgacctcaagtgatccacctgcctcagcctcccgaagcgctaggattacaggcatgagccaccgcaccctgcctgttttttttctctctctttttttttttttttttgaggcagggtctcaatctgtcacccacgctgaagtgcaatagcacaatcacgactcactacagccttgaactcctgggctcaagcgatcctctggcctcagcctcccaggcaccaccatgctcggctaactttagatttttttgtagagacagggtctcactgtgttgcctaggctggtcttgaactcctgggctcaagcaagcctcccacctcagcctctcaaagtgctgggattataggtgtgagctactgcacctggccacaagtgtatttttttttttttgagacagagtttcactcttgttgcccaggctggagtgcaatggcgcagtctcagctcactgcaacctccacctcccgagttcaagcaattctcctgcctcagcctcccgagtagctgggattacaggtatgtgccaccgtgcctggctaattttgtatttttagtagagacagggtttctccatgttgatcaggctggtctcgaactcctgacctcgggtaatccacctgcctcggcctcgcaaagtgctgggattacaggcgtgagccactactccaggccaagtgtatttttttttttttcagacggagtctcactctatcgcccaggctggagtgcagtggcacgatcttgacccactgcacgctccgcctcccaggttcacgccattctcctgcctcagcctcctgagtagctgggactacaggcgcccgccaccacactgggctaatttttttgtattttcagtagagacggggtttcaccgtgttagccaggatggtctcgatctcctgacctcatgatctgcccgcctcggcctcccaaagtgctggggttacagttgtgagccactgcgcccggccgccaaatgtatttttaaattacacattctatagctccccactgggtgaccaagtaagagtgcttttcttttctttcagtcaacaaatatttttctagcaactcccacatacccctgtgtactatcctatccactggggagaaaaatggtaaataagaccgtttccagagcatatgagggaaagaaacaaaaccacaacagatgagcacgccacactattccatggcacattaaatgctgcggctaaaacatgcaagaagctagaagtagaataatggcgatgggggccttctctgggagggatggtcagggaaggcatcttggaaggtgtggcctcagtgacaaaggaggcctgctcagcacccttgaagaggtccccacctaggctcgtggctatttctggacaggtttctggatgtgacggtgcctgtctgaggagaggggcagatgtgggaggtggctccatttcctgcaggagtcttgagatgcttgagtccctgggtgctggggaagtcagttctagatatcagtgggtttgtgtgaatggctaatgacctgaaatcaacccctcatcctgtggggcagagatgttgtttcaggcactgctctgaagtatggtggaaagcacagagttgcttggggtctcagctttacctgtcccggtctctctttttggtctcttaactctaggctggatggacatggccccttaaggaaatgaaagtgagtgactgagtcctagcagaaaaaggaggagatcttggagttcctgtcttccaacacgcacctctttggttgtgatggtgaagtgggacagtgccatctcagcagggaccttggatgtgctctagagggggtcttggaggtgtagcatcgttacatcccctcccaccatcctgcctacacagtggttttgggggcacagatatttcagagagtagtcttcccaagaaccctacatcaagtatgctaccaccccttcccattcttgattctggtcccctctttattttcctcatagtattcactggacctaacttatgatacatttgtttgttcactgccatgtctctggcacttagagcagtaactggcacatattaggcacccagggtgtaattcatttgattaatgaatgtattgaatggctgcatggatgaatgaagaggaggaacagagcagatgtctgaccagctcattctggcttctggaaggatcctgattgggaattttgcatctttccctccccacagcctcctagtcactactactaaagaatagagaccctgactcccacttttttttttttttgagatggagtcttgctctgtcacccggctggagtgcagttgtgctatcttggctcactgcaacctccacctcccaggttcaagcgattctcctgcctcagcctcccaagtagctgcgactgcaggcatgtgccaccacatctggctaatttttatacttttttattacaggtgagctttcaccatgttggccgggctggtctcgaactcctgacctcaggtgatctgcccaccttggccccccgaagagccccgcattcttaactactgtgtttggtatgtttgaattgacacttgcctcttaggaaggggaatctttttagaccctggggaaatctgtagttattgcaaaggccttttcctgcctgttgggcatttaccagatctttcttcctacacaaggagagcctcccctggttgaatcctgctataaatctcactagtgacccacaaacaggggtcccaatgtgacctgctcattaacacaaaaccgtcagcccccatacagcttcctgccttcccagtcgggttgaggcaagaaatttccattctgcccatgctgatgaaaccagtcgccagcatttacctttctaaggggtcctttctcctcccaccccagcccaccccagcacaagaatgtaagagagggcaaacagctgcctggcttcagttctatggccactcaagaattggctcgcatctgtctgccaggacagagagcgtcctgagggggctggtgtgtgtgttgtgtgtgtgtgtgtgcacgcgcgcgtgcatatgtgtgtatgggggagttcagtttcaggtaccacacatctggaagtcagagaaagaagccactgcacatgttagagccattttggggggcaatttttaaaaaaaaaaacatttttaatgggctgagagccgcctcgtggaaagcccggggcgggggatggagtagaaacagctgcgggagtgattcttgtctccatatatgtttataaggcactgagggcgggattagcagctcctgggaagtctggctctagttaccgtgtcagcctgtcctgggggcagtcacagccacagtgaccattagcaggcacccaggcctgtctttggctcggaaacggtggcccccaatgtagcctagtttgaacctaggaactgcaggaccagagagattccactggagcctgatggacgggtgacagaggtgagaggcactggtgtgagggacaagtgtcacaggcggggaggaagaactccgctatctggtggtggaaatgtgtgaggatcaaagtccccagggagagtaggtgttgcgggcggcagggtggtgggctgggcacgggctgggcataggctgggcaggaggcttcggggccgcggggaggaggctggagaagcaggagggcacgggcggccctagctctgcaaccccgggaaggactggtaggtggagttaaggatatttggacaaggaaacgctttgaagcttttctctcgtcctccctactcgggacctggtcgcctcccctccataaaaccattagctcctggtgccagccctatctctgctccatctctcgtggttccagccggtgcattcacagaccttctgccccgggggacgaggaggatttatggggggagaggagagggggaggggcatcctccagaggagggggggtctgaggggagtcgggcgtggaagctgttagtcccgggctgggggccggctcacttccgagctggctctgcatgacaaaggggaaggagcaagtgtcttctttgatctgccccctgccggccccacacacctgcctgttggtgcccccgccccagccgaggcttcgagaaggaaaatcaaaagggggcttggggaagggctgtgtcccagctctcctggaccctgctcgggccactgtcctctcctggcggccccaggacaaaaatacttcccgggctgatgacccgaagcacccgccgccccctcccggggagcctggggacgccgacgcgcgagagtggcgcagtgagccggggcgcgcggggctgcgctcgtcaggtccggggccccggggaggccgctgggggcgcgggtcacgcccagacgggggccccggaggaccgcgggggagccgcaggggccgtgtgtcccgaggcgcaggctcgctctagcagcactgacctgctgcgggtcccagggcctggggacaggggctctcgggggcggatagaggaacaggcgtgggttacagcaggcaggaggccaagaggcgggaggcccgggagccagcagggaagggctgtggcatctggaagatgcgtcctcagctcaggcatttgatgccagagctgccgcctggcgtcggcagtgtccccggtgcagctgctgggcaaggtactcggtgccgccctcgaggaccacggtgccgggaggggcaggggccgcctagggaggcaccacctcagccgccagagctttccgggcgggcggttcgcggcgtggcttgtacatttctcagagaagctgccttgagaaagtgaaaagtccttgatctgtacgcaggggttgggacttaggaaacccgctgagggtgagaagggcgcagatggagaggggagactcctccctgggtgcaggtaaatccaattcaccaaaatgttttaatcctacaaaggagagcctgagggtcagagaaataagtctctgggctggaatgagaggtaggcacgtgggggagtggataggatgggccccatttctttggatgttctgcagcaaggacaggtatgctttacaacagccgaagtggcctcccggctgccgaacggaggaacgccgcaagctccgctcttgaaattacttgttttcatttctctttgtggtttctcagctcattatttctttggaaattaggtcctgtgcagggttcccacagtttggggtaagagacagaagtcctagggtgggaagatgagcagtgggaggcggaggctggaaagaggccgagcttctttgtggggaacacgcagcacgtaagcatcagtgcaactttctccgcctcaccccggctcctggtctgcccttatccgctgagtttccacactgactctccatttctgttttctccagggaaccctactctggaaactgtcagtcccagggcactggggagggctgaggccgaccatgcccagcctgctgctgctgttcacggctgctctgctgtccagctgggctcagcttctgacagacgccaactcctggtggtgagtaagaggggctgaggtcctgcctgcacagccggaggcctccttcagcgactgagatgaggaggaagggcaccgtgtgtcacggtagtaccttgattcctgggagtactaagggcctcttttatcccaggaaaactaagaacgctctgtgtctctctcaacccttatctttgtaagggttccctgaggataaaggttccgttcatttgatttttttctctaatcctgtccacattccttttccttggaccttccctcatgcccatgaattgttagaaattgctcttgggtcaacaagaatatcaatacttggtagttttttgttcctttgttttgtgtgttttgctggtaggatatagaattcctcttttataagtctgaaggccagatgaggggttcacagcaccatgggtggctggctttcttcttatgttttaagggctgttgtcattgccaagttgacagggaaatggcaggcgatcaccacctattttgcatggtctctgccactagcatttttactcagatagcaaatctgcagccttctcatctaacactctatatggctggtagatgatgagcaaaagggagagcctctgaactggtggagagtggatgaggggaagctcaaagtgagacatggcagtgaaaacaagtagactagatcgtgatgtatgtaaagtgattggattttaaaggcccaaagggagtaccacgcaaaggattgattgctttccatggcttatcatgtacttgggctgcactgaactagtcactcctactcattgaatgaggcctgtgctctcctgttgaggtttggctctttttgccctctattaaaatgaagagctgctccccacccctcgtcttcttatctgcctgacccccattcttaagatccagttcaaattctggccatttccttataaaggcttctcttcagccataagggctattttcctatctgatcacagcagatccagaagcatatccagagtctgtctggggcatttggcatctcgcatgtcctttgtgttcatgcctcagattccttcagtttgtcctttgaaggccagcactctgatttactaatttttctttccagggccttgtacacagggacgcattcaataaatgtgttgaatgaatgacttaatgctgcacacaggcgtatgctcactcctgggcctttttttcccctttctggattgctgtcctaggtcattagctttgaacccggtgcagagacccgagatgtttatcatcggtgcccagcccgtgtgcagtcagcttcccgggctctcccctggccagaggaagctgtgccaattgtaccaggagcacatggcctacataggggagggagccaagactggcatcaaggaatgccagcaccagttccggcagcggcggtggaattgcagcacagcggacaacgcatctgtctttgggagagtcatgcagataggtaagaggccattacaagagggctcggccaaggaactgcactcgtctcgtttgggagcaattaagctctctcaggactggcacagggagagcccaaaggcagcctaagtgggctctctctaggcttggcagcagtgtgcaccacgagagaggcacacgaggaagcaggctctgggaggctgcagaaaccacacgcttgatgttcctctagctctctgccttccagcctcacttggggcaggttgcttgggactcactgagagggggcaggttgcttgggactcactgagagggggcaggacatctgagttgacttagagtggattaggagagccgcccaccgccactgcctttgtgtctcagtgcaaaaaagagccttgggtagagaaccagaaattgcagccctgaatgtctgttggatttttgcctcttccacttcaacctttgacagagagatagaaatgtcggccaaagtgttgatagctgtcactaacccaaccccatccagtcccagctttttcttttgaaagagatgtgtgaacatgggggaaggggtcagacgaaagaaaagatgagagggagagggccaagtcttctggattcctgtcccttcccctctcccactgctggccaaggattcttgggccaccctattgcttagatggaggtgtgatctgaggtctaattgttttaggtccttttgaaatgcaatcctctcctctctggcaagaaattgagaaatccggccctattctactgggtcttatccccagggccataaaagggaagtgttagaatgctgtgttccttctgcctgacattctcccagaacacctcccttcaaaaggttacctgaggctggagtttccccagagagggatttcagcctgggaggggagttggggaggtagagatttcttcgtgctcctctcttagggaggatacttggaaggctccttccccctcccacttattccagacctctttccctaccctctctgtcccatattgagaagtaatgcccaatgcagtagctcacgcctgtaatcccagcaccttgggaggctgaggcaggaggattccttgaggccaggagttcaagaccagcctgggtaacatagtgagacctctgtctctataaaaaaaattttttttttctaaagagagagagggaattaaagatgggaaaagtacacattgaaacttgctgctctcttgcttccttcggtatcaactcagggtgcataaaaggaaggtcctagtgttcctggggcagctttcccaaaagagtagacttggggttttagtgggatttactcatagtttattgattcttctcaaacccacctggcacttgtctcttctttctggcgaaaatcttggcagcacttcctgccctgcgttttgggcaatgaaactaggacggcccaggtgcagagtctcctctaatctcttcagtggagttaatgtttattgaagacctaaagtaggcctgatgttggctagatccttttcatgtgtatttcgtgtgcataaaggccccaaagtgaggctgtactttaggaaagaaaggggttggcaggaaaagacactccgctgggttcagatgtgcactaggtggccagcgaaagcaaaccctgtcgaagagagcccatctctctgtgccctattccgttacaaaatggaacccttctgtttgcctaattttcccccttcctttttatagcatcactgaaggctcatgctacctaggaggctgtcctcccttcctcccccctgagcccagagtagctcctggtgagtcctccctctccctatcttgagaaggaccgtctaaggcttcctttctcctttgaagctgctgcaaaagtcggtcaccagagggcggcagagcagctcggaggagcctcggcccgttgcccagcttctgcctagggagtttggaggcaacttgggctgctatggaacagagagggcatgaaattgttctgctgtctcctgtagggaaaagacgcatgtccctctagtagctcacggctgcttttttttagccgtttattcttgagatggttagagattcaacctgaactgttgcgtatatagataaacccccacgttgcttatccattctgaagccccgaattatctctttcttgctgaaggtagcaacagtagatggtacttagtaggcttacccaagggcccaaaggctgccccgtgaaggcagagctgcccacactcagcttctgatgaagacccgactgaaagaggcaggcagcgcaccggaggacaaatcaggatcccaaacagtcatgataggttcgaactgtcagagtacagaacgtctggtgtgttagttcagctgcaggtacgtgattttagaaggcaattctgagaaggctgattcaactctgaaaagcatgtttgctaaagaatgatagaaataaatcagacatatgtagcttggaaaagtgaaaacgtaaaaggcttaatagttgttttcaaacactgaagagctgtcaaatgggaaagggattatagcagagtgcaagtgcagcaggcaggaatcataaggaggcgtatttcagcttaatacaagaaggagcattctggtgattggagtcatttgaaaaagatggaatggattgctttgaaaacctagcccactggtctgaggaactgtgtagagggaaagcttccggtggctatggagggtagctcggggctgaagcttgggaggctccctccgttccaggatgccatgtcaggtggttgaggctgcattttaaggagatgaattcctcaaagtggggcccagaccctcctccctgagaggctctttggccatcttaccatccccagtgctccttgtcacattctgagccccgtagaccgggtcctgtcggctgaatcatgagtgtaacttcctgccatcatttcggtttttcttgggctattcctatttcacaactgaccagaagccagccactggttaatagagaaaaacggactcactcagcatggtctgtttgtaaacttcactgtgtcatgcccagataatcaagaagtagggccaagggagagatttctctagacctctcggttgattgcagactgcttccctttctaccttccaagacaagactctgggattctgcctggtttaatctctgagatcaggattgaatctgtttcctgctaagaatcactcccttctctccatatctaagtccctataagtatcatttgttatttcttataacagctttattgagatacataactcccataccatgaaattcagcattttaaagtgtaaattcagtggctttgagcatattcacaaggctgtgcaactatcagcactgtctaatcccataacattttcaccgctccacagagaaactgcacacccgttaactgtcactctgcgtaccccaacccccaaccctaggcgaccactattctttctgtctccatggatttgcctatcctgggcatttcttataaatgggattatagaatacatggcctttggtgacgggctccttttacttagcacaatgatttaaaggttcatctgtgttgcagtctatatatatatatatatatatatatatatatatatatatatatacttttttttttttttttgagacagggtcttactctgctccccaggctggagtgcagtggtgtaatcatagctcattgcagcctccaactcctgggcttaaacaattcttccacctcaacctcctgagtagctgggactacaggcacatgctaccatgcccagttttgttttgttttgttttgttttgttttgagatggagttttactcttgttgcccaggctggaatgcaatggtgtgatctcggctcactgcaacctctgcctcctggggtcaaatgattcttctgtctcagcctcctgagtagctgggattacaggcgcccgcctggctagtttttgtatttttagtagagacagggtttcaccatgttggccaagcgggtctcgaactcctgacctcatgtgatccatgctccttggcctcccaaagtgctgggattacaggcatgagccaccacgcccagcttaatttttttcttttttaatgtttttgtagagatggggtactgctatgttgccaagctgttctgaaactcctggcttcaagtgatcctcctgtctcggcctcaaattgctgggattacaggtgtgagtcaccacgcctagtcactttttatggctgaataatattccattgtatggataataccacattttgattacccatttatccgctgatggatagtttggttgtttccaatttttgcctgttatgaataatgctgcaagaagcattcctatgtccatttttgtgtggacatatgttttcctttctcttgggtataaaggcatactttcgagatattgtgggtttgcagatttggttccaccgtactgcaataatactgcaataatgtgaataggcaataaagtgagttgcatggttttccagtgcatataaaagttatgctgcgggccgggcgcggtggctcacgcctgaaatcccagcactttgggaggcccaggcgggcggatcacgaggtcaggagttcaagaccagcctggccaagatggtgaaacctcgtctctactaaacatacaaaaaaaaaaaaaaaaaaactagccaggcgcggtggcaggtgcctgtaatcccagctactcgggaggctgaggcaggagaattgtttgaactcgggcagcagaggttgcagtgagctgagatcgtgccactgcactctggcctgggtgacagactgagactctgtctcaaaaaaaaaaaaaagttatgtttacactattctatagtctattaagtgtgtaataacattacatcttaaaaaaagtacatcccttaattaaaaatactttattgctaaaaaatgctgacacagaaacacaaagtaagtacatgctgttggaaaagtagcacggatagatttgtagcagggttgccacaaaccttcaatttgtaaaaaacgcaacaccggccaggcacggtggctcacgcctctaatcccagcactttgggaggcccaggcgggcggatcacgaggtcaggagatcgagaccatcctggctaacacggtgaaaccccatctccactaaaaacacaaaaaattagctgggcgcagtggtgtgcctttgtagtcccatataccggaggctgagacaggagaatggcgtgaacccgtgaggcggagcttgcggtgagccgagattgtgctactgcactccagcctgggtgacagagcgagactctctctcaaaaacaaacaaacaaacaaacaaaaaaacacaacacctgcacagcacaagaaagctgagcatagtaaaacgaggagctttgcctgtgttcttaggagtggaattgctgtgtcatatgggaactctacgtttaaccttgtgactgttagccttagactgccagactgttttccaaagcagctgcaccgcttaaccattcccacccacagtatgggagggttctggtttttccgtgttctcaccaagttgttattggctgtctttttgatgatagccatcccagtggaggtgatttgggcttgcatgtccctgatagctgagtattctgaaacagacattttactgaaatagaacatacattatatgaatgttgaggtggttcaccacagcagtaaaggggaacatagttgggattttctgctggaaaatgatctgcgtatttagagggaccgtgatgagtgtctggaattgtaggtgctgtagatgttgttcccagggctcctgagttaggaggcagtgtggatcctgtggaagagagaggaagacagcttggatttttctagacattgtaattctagttcatttttgactcctggcctctgccactgtctagctagataatggcagcagtaccgacagacagatgtgcagctcatagagcgtgagaaatggcatctgtgagggagacatttctgctaggatacaacgtcctactcttgataccatgatttcttccttagcctcattctgttcgactcccatgttctgtgtgtttctgaatgcctattctcccctccgctgaggtctcccgcctaggaatctgcaggtcacacaggctcttctgcagtggatattaatgcaggccaggaccggagggacttgtttttttgtgtttttttttcttttttttgagacagagtctcactctgtcgcccaggctggagtgcagtggcgcggtctcagctccctgcaagctccgcctcccgggttcacgccattctcctgcctcagcctcccgagtagctgggactacaggcgcccgccaccacgcccggctaattttttgtatttttagttgagacgaaggtttcaccgtgttggccaggctggtctcgatctcctgacctcgtggtccgcccgccccggcctcccaaagggctgggattacgggctgagccaccgcgccgggccagggacttgttttcttccgggtggtttcgcagggctgagctggggcccagcggcggaagtaaaacagcagatttcagcccattataaagagacgtttccaagcgttagagctacgggaagcgaagccccctgccccaggggtgtcagcagagccgtggcgtgcgggtccgtcgggggagacggggggaaggacaggtccccgggagaggagagcgcacccgcttaccgccctggcctcattctgcaggcagccgagagaccgccttcacccacgcggtgagcgccgcgggcgtggtcaacgccatcagccgggcctgccgcgagggcgagctctccacctgcggctgcagccggacggcgcggcccaaggacctgccccgggactggctgtggggcggctgtggggacaacgtggagtacggctaccgcttcgccaaggagtttgtggatgcccgggagcgagagaagaactttgccaaaggatcagaggagcagggccgggtgctcatgaacctgcaaaacaacgaggccggtcgcagggtaagctgggcctccccggcctccccagcactgcagacctagggggctgttcccgggctgtgccaccagccgtggcctggccttcaaggaaacgggttagtctgaccgtgaagattcttacctacgattgcaaatttacatgtccacgttattgaacaaatccttttcaaaatgccccacttcccaatgggcatacgtgctttttcttttcttttcttcttttctttttacttactttattatttcacggttcctagaggacttaggtgcaatgtttggatcagaattccagacgtaaggattagagcagcgctcttgtcttggccacccctcctttgcaacttgaatagataatgcgatgggatgtttaggccgttagacctcatctagggtttatgctctgttaaaggctctggtaatagcagagtcgactttcaagaactgctgtcatacgtatccagaacccagtcaaaaaacacattcaaatactaatgacaaacacacttctgagctaggagattttagacataagtggaagtgtgagaagacagccatctgtttaaggctggaggaaacagcctccccagtctcatgtaatgtgactgtcttttaagcctcagtttcagcagaagcaaccatgcaggtttgaggggagctgggttcattgtatgtgcagagcacacctgggcggcagcttctgggcccctaggtggcatgctggaaagcgtgaaccctctctgcctgcaccttgttcctgaaaaccccccctctgagcacacatccagcctcctcttttctttgctgtcccccatcgtggctgcctctgccacacaagactggagggcctgccccgcaggaatctctgccttttgctgcttctgcatagccagtgttgacagggaccgagggcaacatgggcgtccacccgggtttcctctgagaaaggtctgcggtctgagcactgggtggtgagaggctctttctcctggaaaaagagctctcaggaaacagcacggacttctttcttggagtgttgtccccactcgggtctatgtcaagccagctggctctggttcccaggcgaggtaatgtaacaaagatgaactcactcaaaaatgagaatggtggccgggagcagtggctcatgcctgtaatcccagcgctttgggaggccaaggcaggtggatcacttgaggccaggagttcgagaccagcctgaccaacatggtgaaaccctgtctctactaaaaatacaaaaaattagctggacttggtggcaggcacctgtaatcccagctacttgggaggctgaggcaggagaattgcttgaacctgggaggcggaggctgcagtgagcctagatcacaccattgcactccagcctgggcaacagagcaagactccatctcaaaaaaaaaaaaaaaatgagaatggcaatttcttagaagtttaacggtggcaccctggtgattcagtaacaggatatgaatataagcctcaaaatgtctttacatagcaaaatcttaaaatgtgaactcatgagaggcggggcacggtggctgatgcctgtaatcccaacactttgggaggctgaggcgggtggatcacctgaggtcaggagttcaagaccaggctggccaacatggtgaaaccccatctctagtaaaaatacaaaaagttagctggacgtggtggcacacgcttgtaatcccagctacttgggaggccgaggcaggagaattgcttgagccagaggttgcagtgagccaagatcctgccattgcactccagcctgggcaacagagcgagactctgtctcagaaaaaaatagaaagaaaaaagaaaagaaaaaaaatgtgaactcatatattggagcacatatcaaagaaatggaataggaagtgtcttttgtctgaatggggatgttgtagtattggccggatggaatgtggtgcacctgtgtgcatagcatcatcagccatgggacatcaggtggagaccagagtgggttatatgcccagggtcttccttacgcttcccctatccagaggctatttttgtttcccagaaaagggtgtgtgtaaggtggggtcagtgcgtggtgatgttaggagttctggcaattgctgatctgtgattatgataggctaacccagggcagagagcctggagccatctcagatgacttctgctcagggcgtgtgtggagccacccggtctctcaggtgtcttggctgtctcccagtctatttgcccacgtctttgggtgtctgggcctgaggagtagagatgtcaatgaaggggttaagatccgcactttatctcctgactgcccagagtcgatccagtttttgaaatcttagttgaaacactgccctccccagtccccattgttagtagtttttctcccacctgatcttcaatcgggcattcttgctcttctcaggtattccttactctatctacctttgccttggtaggttggcggtaggttcctgtgggcagggattgccctctctgcccctttgcttcaaccctgtatgtgctgtatgtgggtgggacaaatggatatacacagaggagttccgtgttgcctcctcgggagaggtcagattcacggaggctgcttgtggctctgctgagctgcgctgtggtgtctgcacgtgcctgtgatcaggcaggtgacacccactcttcccctttcccctgctgctgggtctcactttattgcccttaattgtttgttgtcttgtccgggctgttatctggcagccttccctcccatcaggcttgttcctggcttgctcaccttccctgtctgtctccccgcttagccccttccttcaggccccacacctctcctcttccttaactccttatctctccctttgcctctgcctgcttcaggttgggaattcctggccccctttattttttatcctctctccaaggaacaggcctcggccatcagtcaccatctgaggccagaggtattcactgcttgcctcctcacacctacacacaaagttctccagcaaggactgagtgatggctgggatggaaaatagacaagtattttagaaccatattaaaaagaaaaaaagattatccaggatctgatgtcttgacacagagtaaatcttaggctactttgccagaagtttctcttggcctgcaagagcatctagtagctccttcttagacggtggcggcaacaccagtggctgatggtgttttgccactcaaggatttctaagcattttccagataaaagcctggtgcctaatcctgtaacattcctgtctgtcaccaggctcagcacaccattagatagaagtggaagaggagctgagaggcgcttttccagggacagatcgtagaactaaaacttttttctttttttttgagacggagtttcgctcttgttgcccaggctggagtgcaatggcgcgatctcggctcactgcaaacctctgcttcccaggttcaagcgattcttctgcctcagcctccctagtagctgggattacaagcatgtgccaccacgcctgggctaattttgcatttttagtagagacggggtttctccatgttggtcaggctggtcttgaactcccgacctcaggtgatccgcccgccttggcctcctaaagtgctgggattacaggcataagccaccatgcccggcgaactaaaacatttttgaaagctttttttttttttttttttgctttttgaattagcagtctgggctgaaaatcggcatttccccctatcgcctacaaaaggagcctatatatatatatatatatctacaaaaggagattttgtatatatacatatatatatataaaatcagtagtaaaatatgaaaaaaattgcagatattcctatctctacaatgtctttgaattcagggaaggatggagggggtgtttaagctggtgcacttcctcttggatttgttttcctaaaattctggtccttgccctgcagggtcttgctccgactctccttccccaactctgtctgagtgtttgcccctgcaagagatgcttatccgtgctccgagttgctaagtggcaaagtgcacagtttccaacccttaatgtttcctcctctcagcagtgccagacgcctgtcatccatctctaagccaaggaccatttccagaggaatgtcaggctgcagctcagacccagggcatttgggatggaagggtcattgcaggccccatctttgaagtgtctgtcaggatggggtgtcagttcctttatgtcttggacctggagctgcccggctaagtgctggtgcctttaaccttggggagagccttccttcctcctctgctctaagccagctttaagccccgagattggagtggataagtgcttgttattctgagtcctttctgggtggccttggaggttagtgagcctctctagagcttcagtttctccaccataaaatagtgggaataattccgtaccagaaaaaactcaggaagacttttgccaacagtcatatgcactgatgatggctgtgctgtctcttgcacctgcagtggtctctgcttagctctgaataaagacacaatctgggggctcttgaaaagaaatctaagagaaacccttgaaaaatgagtcctgactcagttggtgacaatagccatgcataagaaaatgctctgcagccggcttgcgttttcatcccgccatctgcacgtctaggcctgctgccagggttggttgccatggtgcgtcagcatgctgccgttgaaaagcactctgtaagcagctttctggtctgctcttgcttttacattttgatttgggataactcaagttcaaatctactccacgttgtggcggttctgtgacttctggggtagacttgttttagatgaaccgctcctgcaggcaggcccagctgcttgcagttcccttgcacgttgcttcactgtgttactccagctctcccaagggggcgtctgggggctgctcgggaggaagacggtggtcttgctcacaaatggatggtgtatggcaagactcctgatgactctatggagttagtgactacatggtaacatggggaaagggaccatttaattctcagggtatttgacaggatcagggagagttttgggctaaccacggctatgccagtgatttctgtgataggcttgtgatacaattggattcttttttctgacttgtgctcctattacgcaaaagctggacacattttgttattttgttttgttttgctttgtttctagagatggagtcttgccctgttgcccaggctggagtgcagtggcacaagcatagcttgctgcatcctcaaattcctgggctcaagtgatcctccttcctcagcctccccagtagctgggactacaggcaccagccacagtgcctggctgtattttgttggttattatttatttgtttgaggctttgatcaagatggagatatctttgttttccgattgtgaaaaggatgcattgattgtaacaggttttgaggaatgagaaaccagtagagtagaaagtgaaagtgcctggtgccatcctcccggctgatggggacaagttgccttgccgccccagggttcttttctgtggtgcctcttttatgttttccccctgagcacctgagcatcttggaaagatctttgcatgcatttgaaaagctatctatcccctaccctaccggcccctcctgtgtactaggcctgtggctaccccagccaccctctgggcctcttccaccgggatcctccttcttactgccttctttctcttcccctaggctgtgtataagatggcagacgtagcctgcaaatgccacggcgtctcggggtcctgcagcctcaagacctgctggctgcagctggccgagttccgcaaggtcggggaccggctgaaggagaagtacgacagcgcggccgccatgcgcgtcacccgcaagggccggctggagctggtcaacagccgcttcacccagcccaccccggaggacctggtctatgtggaccccagccccgactactgcctgcgcaacgagagcacgggctccctgggcacgcagggccgcctctgcaacaagacctcggagggcatggatggctgtgagctcatgtgctgcgggcgtggctacaaccagttcaagagcgtgcaggtggagcgctgccactgcaagttccactggtgctgcttcgtcaggtgtaagaagtgcacggagatcgtggaccagtacatctgtaaatagcccggagggcctgctcccggcccccctgcactctgcctcacaaaggtctatattatataaatctatataaatctattttatatttgtataagtaaatgggtgggtgctatacaat

SEQ ID NO: 2 - DNA, 71711 bp, homo sapien
aaatgctccagatcctcagtgttcaagaacctcaggaagcttcgcagtcctgcctcgtgcctgcttgaacagctggatgtgggcaggaggctgtgggagcgggccatgccagcagaatcccgccttactctggggacttactcttgtcacagcccctggtgtcctgagggtcatttcagtgtcatgtgagtattactgtggctattggaaaggatttggtacgagtttatttgagaagttaggagctttttttaaaaaaaaaaattatctttgataaatttagtagaatattttgaaagtactttttggacagtaatgaatgaacaaattgctcctgaactagaaggagggatctaaacacatcatctaagtacaacagtatgtctgaaaaatatctctgcttgtcttttatttgccctttaaagtctgtgcaaacaaatgtgaacagcctcaggactctaagaataatatttttctatggatgtgtatggacagataaacaaaaccccaagggagaaaaaacttctatttaaataaaaataaagatcccctacagctccatcctcctttgctcactgggtttgctgtatttcattttgagataaaagtagtttggatgattaacagttgaacaaaaagaaagtatttgtgtctgtctaaatctatctctatcaatgtaatctatcttatttctctaatcttatctatctgtcttatctatcgacctaactgtccatctggttttgaatattccgtattccagccataagtagtagatcttttgcatccctggggttaatggttccttgagcagacactgacactgtgccgttcgggatcccgtggggaaaacaccctcttcctcactggtcagtgataccctgtgctcacagctctactccccctcggaatctcctgtctgaagcccctgtaggactctgggatcctccgaatcggccctctccagctccaagcacactgggatccttgccgcaggaggttgctgttggcttctgcccatgctgtgggtcaggatctgcagccaacaggcgtgggagcttaggaaggcacctggtggtttctcggtaggaaaatagtgtggagtgtgtgcaatcatgtttgaggaagcgtcatgagagggtcactgtctctgtggtagtgtccttagggaaccgtctttgcctggatcctggggtcaggtttggcatgaactctgaacttcctccctccgcaggatcttcagtagaaaggtcctgtcctgaggaaatgctcagaggcacttctcttgctgaggaagcctgcctggatgtgtgtttttgtcctcatggagatgcacatgacaaattgtgtgcaatgcctcagcacagcccaacaggttttttctgtttacacttaactagcctacgacagcgggaggaaaccttaaatatttccttttcttcccacaaacgctttatctaataaaacaaaattactgcagatgaagcagggagtgatttaaatcgtcatttaaatcaaggacctgatttggtttggcctccctgggggaccttttagcttgtgctatgctgataacgtctctacagactaaaccgaccagagcagaaggcagggtggcagtgcccgtggtggggtggacagcgtgggggccggcagtgtcagtcactgagtgctgggttggcccctcactcctccatatttctgtaccagtaaaataggttgaaactgacatcgagggcagcttcaagaaggtggggagagaccacgagggcagtaatgcagaggctgtcaccctctggagctactgctcggggactgagaaggaattcagtcttgaatacatgttaacctcagttcccgctccttatctggactggctggctcccttctgcgccaagaatctgaagcccagctctgtaaagcagcaattcccaactattttccccctaaaatacacgagacgcactcccatggggcctatctagattgcaggctgcggcacagataaatcaggctgtgggttgggcgcagttcccagtaaaaccccacttctttctctcccactcaagaaagcagacctccatacgcgtaagtgggagatggtgctctgtcgccccagcccttggcgggggactcggcctgtaaaagctgccaaataaatatttactaagtgaaagatagccctgaatccacactaatttgtatttttttaaagtcattcataaactttagcattttaactattagttagtaattaatcccaataaaccggcaggattttgtgattgtgaaactgctgcaatgcgttggtcagcaggaatatttgttagcatttttatgggctcttaaagtcgtcttagctgtgttactgataaagccagccacaggctttatcagtcctgccgttggctgtcagcgctgcctggataaactcctcatccttcccgggaagaaacttctagcaatgcttaagcaggaggccagggaagagagaatcttgatactgcctgctcaccataggccctctgggggcctgccctgtgtggacagatgcttcatttcatgatcgtatacaaatcgagagcaagagtctcctagccgcgctgagcgtggggcacttgccacctcactgctgttggaactctggagttggggccaaaggatgtagcccctcctcgggggagggcagtggggtcaggtgaagattcaagagctcctctttgccttgtcatctagttgtcctattctggaggaattttaaataaggatttaaaaaaaaaaaaggacttatgtattattttaaagagcagccttgaataggcaggcatattttagtaaaaataattttttaaccctgcggtgtgaagactgccagtcaaatacagtgatggtcattatcactcacctgcccccgcccccaggctggaggaaacagagtgcagagttagaatgcttctggagcattcatggctgccgggagatgcccgagaggacgttgagggcagggcagggtgagcagggagctagctcaccttaggagtgcagagaccatcccaagcagggtctgcagacactgacttcaggtgaccaggcatggagatggcaggtgaaacaggtaagtatgccccaaaaatgatgggaaagagtgaactgggatcacttagaaatcggaagcaatacaacaaaggctaaacatatttgagtaggagttcagggtagacacgctcttggatatcaagagcataaacagaggagctaacaaaaacactgcagagaagctccatcgccccctgtagttaccccacctagcgtggctgggagaagctgatacttcttttctccgtggattcaggggcatttcccacctattttaggtatgccagtttgacacaatgaactttagacgtaacatttcataactgcgatataatttccttctgtttttaggccttgaacaaaattttctttaatgggaaagcacacattttatactgaattctaattatgttcatcttgttttttgaattatttagctacctctaatagagagtctgaaagatgattacattccacagtactaacattttcaatggccctgaaagacgtgagatgcattgctgctactattttatcaaattattgtttctaaaatgctgttttactcttctagtaggaagagtgacttttaaaacaatggatattggctgggcgtggtggctcacacctgtattcccagcactttgggaggccgaggtgggtggatcacctgagatcaggaatttgagaccagtgtggtcaacatggtgaaaccccatatctactaaaaatacaaaaattagccaggcatgatgacaggcgcctgtaattccagccacttgggaggctgaggcaggagaatacttgaacctgaaggcagaggttgcagtgagccgagatcgcgccactgcactccagcctgggtgacagagcaagacgccgtctctaaaataaaataaaacaatggatagtttgtccaacatggtatgttaaaagcgcagagaagctgaagaatgatgatgaagactaaaataacgatgataagcaaagaactaagcaggcatctgtgcagtgattcaggaggggtgtccatgaggggcggcttcggagcagctctccctgtaacttatctcacagttccctcctcctttaaggagtcagaccacggtgggctttgctttagagacatgccactgtgtgctttgttgctcgtgactatcccttcacctttctagaggtgctcgtcttcatgtaaagtcgggtgaagctttttcactcctggagaaaagctcttacaacatttttgggacaaggagcaggtgtgcctcagcgagcctgtcattatctggggagggggctccagataacacacttctacttgctttctttagggaaacgacatggtctcctcctgtaacactccccaaaagaagtatgaaagccgacataaaatacgaatatgatctttgcattaagtattaaatataataccttcaatgtagtatttgtgcttctctctatccagttctcagttgtttagggatcttctgagggcaaaccaaaaatgtcagtaaagcaaaaatatatcaataaggcatcatactgacgaaaacaaaaccagaggttttaaaaaataatctgggccgggcacggtggctcacgcctgtaatcccagcactttgggaggctgaggtgggtggatcacctgaggtcaggagttcaagaccagctatggtcaacatggtgaaaccccgtctctactaaaacacaaaaattagccgggcatgatggcgcacacctgtaatcccagctactcgagaggctgaggtgggagaatcgcttgaggggagtgggaggttgcagtgagccgagatcgcaccattgcactccagtctcggtgatagggtgagactccatttaaaaaaaaaaaaaaatgtagttatcaattttttgtttttgaccaaaagtatttcaggaactttgaagaaaggacctgaaaattattactcaggctggtatttagtttgctgacttttaactctcagagctgaacagtctaatccttgatcattccagagtgagtttaggaatttgtagtcatttcctttttactgggtatttgcatacatcactaaccagctgggattagaatgagcagtctctcgatgctgaaatggaatgatgagaactcagggccagcctgaaatgttcatcctcatcgattaatccttaatgaacactcatgcatagatgacatcaaagaaggtcctttgcaatgtacagggaagacaaaccagcttccatagtgtacattcttaaaggaaggttccaatagaccgatacacatagttaacattttgtatttttatccatgttttgccccaagattaaacattaggagtaacgtggacatttgctcagtgtcgagggaagggtcagtgcatataactaggaagaaggctatctggcagggttgggaacgtgacctcttgccctccaaagcctgggatgctgaagtgaatgcctccaatcttgcggtgtatggacacagagcgaacgctgccctctgaatacagaccagaggttagaggttaatgaatgggtgctctctccacactcaggatcccgttcaatagcggttttataaataagggcttaaatggggtcagaaaaggacctgcatattgcttccaaactctctacatctttttgaagcaatagtgttcacagatgacatccttccacctgggaagacagagatgaagctcttgtgcttggagaactggacggctactcctggctcagtgtgtctaaaaacaggaccaaatggaaaacatagtggggggggaggtccttgctgccccctattcttctctagtaatcccttaaaaaataattgcggacccaaacctctggcctccagcacattttccacttgattagaggcctttgtgaggtggggaaagggacctgcagacttgtgtattgtgctggggcctgaaatgtccagctgggattttttcccatcaaaaggggattttagtaaaaccattatcaggggcttagaggagaaaagctgttgagctgcaagtgagggggcagattagcattagcgggcttgcttctggccccagtggaggagcgggaaggtgtttgcagccacttgcacacaagttccttagtttctctgcaagttcctggcaggtgcagaggtaggaatgaatacaggagtgggaactaacaggcttgaacaatggcacagggaggctttatctctgaagtatcaagcggaaggcagcccaaatcaggaaggactgcaaggtgttgttgatacctgcttcagtgtgtagacggccgtgggactggcctcattgctgttatgtgtggccacgtcgcctggaatcccccacccacaacactcgacccctctcgacagtcttcatagacggcgacaggaaattcagaaactgggaaatggccatgctggagtcctttaatgggcgaatggacacctttagggtggggggtgggtgtgctggtagcagctaaaagagtacagaggaaggttaggaaagcagcagcagtggctgtcagcctgcaaatcagtgtccgggctgtgtggatttgcagactgagccacgggaacctcctggggagagggtttggggaaggtcccctacaagagaaacgtgcatcatcttgggattactggagccctcagctataccttcctctgcaaaacggagcacagaaactggagtcacgtggtttggatggagaatgttgaagccaatagagtaattgctgcctgaagggcccatgtgaggaatgtcggagccggcctgtcccggaaatgctttttcctatgtgtcctctgtacactgttgctctagcttcccggcagaaatggggtgtggatgaaaacaacgttggtcctgacggctgtgagcacagaactagagtgacagccacatgcctcccgtaggacattttcaggcttgcagtgctgccacctcagaggtctcagtcacaccaacatcctcacgccagcccagtggccacattcgcaagagatttgtctagagtcaaattcaaaggttgtttctgtggttacagaaagagggcctaccttcttgaaaatgaagcccagggccgggcctggtgactcacgtgtgtaatcccagcactttgggaggctgaggcgggtagatcacctgaggtcaggagttcaagacctgcctggccaacatggcaaaaccctgtctctactaaaaaatacaaaaattagccaggcatggtggcacgtgcctgtagtcccaactactcaggaggctgaggcaggagcattgcttgaacccggggagcagaagttgcagtgagctgagattgcaccactgcattccagcctgagcaacagagtgactctgtcgaaagaaaaggaaggaaggaaggaaggaaggaaggaaaggaaagaaggaaaagaaagaaaagaaaggaagaaaaggaagaaagaaagagaaagaagaaagaaaaagagaaagaaagaaagaaaaagaaaagaaaagaaagagaaagaaaacggagtccaggaaagctgttcttggaggctatgaatcaaggagcagccctcccagttcttccgaggagcagctttaggaactgctggtcctcagcgttcacacattcccctcactcagttctcattctggctcctcagccagccccgttttcttcttcttggctttgtgcagggtgatacgtgtttgcttttctttcctttacaacctgtattctctgtttggggtgccttccctgaatctgtattctttcagtgtagtcactaagaatggcatatttcagctattactttccaaaagttgcgcagggagatgttctgctttcataagaccttcacggatggtgccaggaatgaatgtaatttgccttatgcacaggccccaagtccctgaaacttttccttttttatttattctctaaccaaaaatgacgtctatattacagagcttataagctgtggctcctctagccaatacagcttggtagaagcatctgcaggggataactgcctccaccttttttcccacttctacacctgcccttcccactcacagtttgattccccgaggccaggctgttgagtaccaggagggcaagacccgaaggcctctcctgccctcagcctgtctcttcttgtgccattctacggaatctggctacattggctcagaagttatttttgtaagttctgctaccttgtcctaatgtcagttttctgtaggaggaatttaggtcacacaagcaactttacttcttcgtcagggctgttattattttcatcttcatagactctcttatattttatgaagatgtcttcatctgggcaataaagatactccttttaataaaaattaaaaaaaattaaaaaaaagatactcctaaaattttaaaatgttttttcctgaaaggctctctagaatttgtcctcacagatacacttctgatttttcttttgtaataaaaaaaactagctctttttcttgctgtttaaattgatacctccatgtatgactaaaatttttcccattttcttcctcccaaactccccagatatggcaatctaagaaggatttgtatgaagtgccctttaagaagaattagaagtttaaagagaaaaaaaaaaaagcattagaagttaatgtttgattctcttagctccaaaagcagagagctgcaaaataacacctggctctggggagtaacctcactgatattttaaaattcaatttcatcttttccaggaagtgaaattcctcatttgtcaactcttacgcctggaggaaatactttgcgggtgcgggtgaaagagaaaggaccagaggggatttgttagatgggaggaggttgtggttccccttgggaaatagcttccaactcacagacaatgctgccacctactgacaagaccaagacatgggacgtgcagacttcgtggatttctccactttctgtcttccacagtggaggacatttagttttgcattaaccatactttattgtactaccttatattggaccctaaaatcatgttcataaacttggggtaaagaaaaacacaaggtcggactcctagttttaataactccaggacaggtgtggatatgattcacagctgcttcacaatggggaaggtaaattgtgtgtaagagggttttttgttgtttttttaaagggctggggaggctgaagcaacagtccagaaggagacaataacagttttccagccctacctttcaataatgtgtagtgcttgacttttacctcttaacccacatatgcacatttttatttctaaagaaagcagttgtaggctcctgcaatctcagcactttgggaggccgagatgggaggatcacttgagcccaggagttggagaccagcctaggcagcatagcgagaccctgtctctacaaaaaaaaaataataatagtaataatgggcatggtggcacatgcctgtggtcccagctactcgggaggctgaggtgggaggattgcttgagctcaggaagtcgaggctgcagtgagatatgatcacaccgctgcacttcagcctgggtgacagagcgagaccccaactctaaaaatcaataaagcagggatgaagctgtttgctgctaaatcctgtgtcctacgttaatgagtttctgcagttccccttgtgattccattgaaaattagacccttctgtgtagggaagagagaggccagctgccttcctgggggtcatgctgttctgattgttgacatctgaccctgagcacaatggcagggcatctgtctcaagtgcacagacatcagctagggctggaagagccaatcctccatctactccaggctctggaaacttgaagaccttttctgcttcgtacaaccgtcagctgtcagctggatgaagttcagggggccacagaacttaaccatcctgcttttacagattcctgaaaactggctaaattctgtgcatctgaagtaaattaggaaaggtagaaattgtcactttcatcttgtcattttcgtgttgtttgcttaagacacacgtactggccatcttgtcgttgttgttgttcacagcagtggagttttgggcaatgaagttaaggtttaaattactgaaagcagaaatgcttgtcttccatctgagaacatgaagcatttatttgaggggcgtttgcgggcttaactgttacaatttctcccttactttactcatgtgtccaattttagcctcagtgattgttctagagattctcagaaatagcaggactaatttttttggctcctccctgtttagtgactacgtctcagaaagccttgccttgggctagaaaaaggtagcagatgtgtggccgggcgcggtggctcacgcctgtcatcccagcactttgggaggccgaggcaggcggatcacaaggtcaggagatcgagaccatcctgactaacatggtgaaaccccgtctctactaaaaatacaaaaaattagccgggcgtggtggcaggtgcctgtggtccccgctactcgggaggctgagccaggagaatggcgtgaacccgggaggcagagcttgcagtgagccaagattgtgccactgtactccagcctgggcgacagagcgagactccgtctcaaaaaaaaaaaaaaaatgtagcagacgtgtatgtaaataatgctagtttgaggccaagatttcctaaggagaaatattatgaaccttggtaggaaatatttcctcatatcctttttagatgagaaaaacaatgttttccaagccatagtaattccacattaatatttatgaaaaattaatgtggtctcaactgttttcccacagtccagttccagtgtctcagatccatgatgtaaggagtaattgttgacaccccactgtgtggtaggtctgatccttctggagtgtggattacgtaaatgggggagtaataaatataagaaggtgcctagtattaacaaattagacccttttactctttctggacaagtgggatttgtaactaaaacatctgtgaagtcaagcctttttgcccttgaatgaagagaaaatagctagagtttttgcaacttgattctactttataaaaggattgtgtggcaggtatttatagcatgtgaaatatgtgtgagttcctagctttgaagctctcatgagcatgtacttccagcattagtattctgcattactatgtgcaacaaagcagtgttttggaaactggctcaaatcctctgagagcaacaggcaacagatttgacagttagctacttcagtaccttatagaccatttaacaacatgtactagttttttggtttcctgaataaccctatataatgcttgcaaacatgtctaagtttgcataaggtagtgcatattaaatagtaataacttttagcatttggggttttttttttttttttactcctaatgaaaataatatgctttggtgtggcaccttttaagaaacttttttttaaggctgaggtagaaagatcccttgagcccagaagtccgagattgtagtgagctctgatcatgccactgcactccagcctgggcaacagagcgagactctgtctcaaaaaaaagacaaaaaataataatttttttaagagatggggttttgctgtgtcgcccaggctggtcttgaactcgtgtgttcaagtgatcctcccacctcagccgagtgagtagctgggactacagatgtgtgccgtgcctggcttggtgccacacatctctgaagagagacagggtggtgctttgcagtgcccctgtgagccgcctccatgctggtcaccttctgcattggtcattaagtctagagcagcccaggttctgacactaggttctcctctaattacctaggcaaaatcttttccactttgttaagcatcttttcccatttataaaattaaatgtaccacatctgccagatttgggaaaacaaaaatgttgagacagagaaaccgaacattgtgttatgactgagttcttccacagatcacactcacattcctgacctggtctcacttgggtttctctgctgcgccacggctgcagacccagttctcttctttgtaattgagactcatttgtttccactatcacaaatgcaagtatccttgtaagttttttataaggatataaagcatttgttccttaaacaactaaagtggccgggcgcggtggctcatgcctgtaatcccagcactttgggaggccgaggcgggcggatcacttgaggtcgggagtttgagaccagcctgaccaacatggagaaaccccgtctctaccaaagatacaaaattagccgggcgtggtggcacacgcctgtaatcccagctactcaggagactggggcaggagaatcacttgaacctgggaggcggaggttgcagggagccaagatcgtgccattgcactgcagcctggacaacaagagtgaaactccgtctccgtctcaaaaaaaaaaaaaaaaaaaaattgaagtagaagagtaatgaaataatagaaacttaagtcttctttttaaagaaaatatgtgcacttttctgggttaataaatagcaggcagaggaattccacttcgattgttttattgggagtgggggtttaacataccccactctggtgctgctcagttaagatctcaagcttactttcttttgcacctcaactggagggcttggctttacatacgaccaaatattctgggttggtaaaggcaactccagcaggcaaaatcagagcaatccctggaaaagaggaaaaaactgaaactgatcatttgtggacatttaaatttaccaattgtctagaaattccatacaagagctgagatatatgctcttgttccaactgtgcacttacctttgatacttcattaagtaaattattaatatttggcactgatctaaatatgcatgtcccatctgttttacaactttttaaaaaatttaacttgctgcctgatagttaaccaagtgcattgacagaaatgaggtaagtatgtgacccaagtctgagcttaggtttgaatgcagctttctaatttctaatgctgtgctttactcatgatccacattatttcatcaaaaagcctcacccctctgactcctcaggggttcataatggcacaaaatttaggtcttgccctctactaaagggatggaattaacttttaaaaggggtgatgtttgatgcagggaagagaaagagaacagagagaggggaccactagatgacttactatagtccctccctttctaccgcagaacacagcagagatcagaggccagggctttccctttcatagaactgggaagagacagttgtcagaagctgcatgaggtcttggttttgttttacaaatctgatcttttaatcaagaggttcttattctttagaaacacagtggtccctgggggccactaccctttccctttgaaaacttgaattcgaattctctaagtcaaaagtgaaaggttttgtttgtattctaagaccagcacctatctagtaaccacttcaggaaagcagcaggatttgggagctaggccatgctttaatttacatatcatatgtccttatgtaagagaaagttcatacctttcaaaagaaaaaggaacgtttgcttttttacatctttgttgttcatctgactcatgaaagaacatgatcggttcgagtttatttttaggatatactggtactggcttttagttttagtaaatgttaagttggacaagttaggggcctagcttgggagctgcagaaattggctgagccccacaggtgatttatagataatctttccagtaagaacattgaagggctacacacaatgacacttagaaaaagaagggaaatgaagctgttccttgactactacccagtttctgttgaggtttattacttctagatgataaggtttacacgaagtttacattatgttttttcagttctcaagtttcagcaaatacctgaaccaagtttttttctgttattctaagaactgccctggagtgccttttaacttttgtaccaccacgcaaagtgtactatcaattcatgtcctttagctcttctattcttcaatgcatttctcccattcctgtaggtatggcggggatcaacttttcataccaccaagagtcacccctattccctttgaagtactgccctatggcataagcttgttcatacggtgttcaaacagctaccgttcacttctatgagggtcaccttactggaaaccaaggtatgacgagtaactaaatcttctcatcaagcagaagggagctggactttagaaatggagcctgggccacgcagagtggctcacgcctgtaatcccaggactttgggaggccgaggtgggcagatcgcttgagcccaggagtttgagaccagcctgggcaacatggtgaaaccctgtttctacaaaaaaaatacaaaaaaaaaaaaaaatagccagccatggtggtgtgcgcctgtagtctcagctactcaggaggctaggtgggaggatcacttgaacctgggaagtcaaggctgcagtgggttgtgattgtaccactgcactcctgcctaggcaacagatcaagaccttgtctcaaaaaaaaaaaaaaaaaaaaaagatcaagaccttgtctcaaaaaaaaaaaaaaaaaaagacaggaaggcaggaagacaggaaggaagggagggagggagggagggaaatggagaaatggagcctaggtttgaatcctggctccctcacttactggttgggtaacttacggcaggaattatgacttatctggaaaacagggataatacctgtttcagcaggttgctttgaagattaaaacttacaagtaccttgtaaaacacacataggttctcaacacgttaattgctttccatccaaaaaggttgagagatgagcagttgaccttcactaaccactctaggtggtttatcatctttcccagagaagctccggctatatactaagtatgcctcattcaggataaggatatagctagacccatggtcgtaactttcaaacatcaatttgccgacctttagtcaagcgtatatttaacatttaacgtaaaaaggagacaaaacagaagaacgtgcttcacgttacaggtggtaggaatattttgcctattaaaatgaagaatgtgaatacagagcctaagacttgggtgctcaaatttttatcaattgaatctgtacagccatgcagtctcttggaagaaaaacagactaagaacccactgccgtgtaaccttcaggagttgtgtcaaatgctggattagaaagctgaccctaattcagagtccctacttcttaataggcttcacacttttttttttttccaggcattaagcactgtaacctaagtgggaagaaagagatccacaccttccccaaagaaacagaagatggatctagtgtcaggctcaattagacccaattgtgatgactctccaaaaaggaacaatgcggcttttgtgatatgctcaggcagaaagcttggacattttacaaaacaatcttatcccaagagaaacctgggttccagccctcttcctggaaagaggggttgatccaggaaagttttatactactcttatcagctcttgctgagatcagtattttttttaacaatctcagaaacaacccagaccaatgtgaaaccaggaatatgaaccactcccctgttggagcactcacacccataggtctccacagccaaaccacagggtgtcagattattttgttactgtctaccaaagggaactcttgctggaattctggtatttcattaatctgccccgatttcagtctaaaaacccttgacagagtggatccagcggccagcctcggctattggaagtgctaaaatgcaaatgtgcaaaatcctggccaagctccccatcccccaggaaagtgcttccttacagccgggcctggaggggaatgtgaaaaagagggcttgagctgccctcctcctctccacccggaccctcgctcacactgggagattcagtatgcatgactgagccggcaagcacgcaaggacagcgctcttttaacttttctcaacaatggcttcagtccttccaccttcacatcctccccacacccactctcagggtaaaaaaaatccatctttcttgcccacgtcgtgaaccacttttcaacatcacctctagatctcattttcacccaaagaaaaactggccactcggggaaactgtgacttacatacaaatctggttttttaaaaagtttcattttgttcaatttctttaaatttccacgttgttgaaagtttaaagccaaacattatataaatctccagtctaatcacatttctagaaacaaaacatgtcagtagtaaaccttatacagaataaaattctacccatgagttgactcacccccacataggatgcaccaaactccaccttgcgtcctcttagagtatacaaacaacacctcctaccttggcatgtacccaagcacacaatgccttaaaaataattcgcagatacaaggctgttgttttttttttttttttcaaaaacatacttcatatttcctcttttattatataaatatcagtttaaccttttactgtaagaatataaacgttttaagaggatctttgttattatttatacaaattcacaaacagtacaattaattgataaaggtctctgggtttctttaactccatggtcttgcatgttgctgtggagggttctaaagaaataacaacaaaaatccaacgaaaatatacatcctactcagaagtgatttctttaaagccacaagtcccaacccccaccaaaagaaagaaagtcatctattcctccatttagaaacggaattttttaaaacccacaaactcccattttgttaatagaacagagataagatatgagcttcatcacagccccaggggctctgcaggccagctctgctcctgtttcccacaggaagccgcactgtgtgacctttttggggggaaacttggaagagggtgagggtagggcagaatttgcatatataatcatcattttcaagacacaatctgcatctccaacaaaaacaacggttcaactctcattgctcccacatatttgtgctataaattaagatttagaaataggtcctcaaatcccaatgaacaaggagaaaaaggaaattatagccagaatgtggaagtggggcacactggacggatggaggctgggaagaagccaacacaaaaagacggacaaacccaagggcatctttccagtctaggcacaaacatgtttcagtctcaaaatatctctcttgtagaattccagggcttcagaaaaaaagtaaactaaaacgaggtagccagacatatatatgtatatatatatatatataatttatatatatataatatatagaatatattcagcagaaaaaaggaccatgatttcaaattttttccaaaaaaaaatttttaaacaggaaagaagattaagaacatgaaatgagcatgaatagcagagtactgtaagaggaggagtgatgagaagagactgggattagttacaaagtggaagggtgaaaaggcctttgtagctgggtttgctttttatacatttcaaaataaaaaccagatcacagtattcaaatgaaagctgaagtgaaagcagacattttcctcaactccccagggttgaaaagaccagtcactccccacccccatttccagtcacagcagtggggatacagtagctgaatcagtcctccaccccctgcaggggagtgggtgggtaagcagcagagtccatctctccatccgcggggaaaaggagctgggagtagggtagggtaggaaccccagctgcaaagagaatgggctggaagccgggagggggctggaggagggaggaggaaacgagcctgaggcttctgtcatagccccatctcatccgctgcaatgatctgtgcgtaagtgtgcgtgtgagtgtgtgggggcggtggtaatgggaggatgaacagggcgggacaaggggagctggtgctgccgccctcacctgaccttctcactgtccgtcatctgccagagtcccaggttgagtaccttgaggcacggcagctgcgtgatgcgctccaggccgcgcttggtgattcgggtgcagccgtacaggtctatgccggtgagttggctcaggtgctcagcgatcagctccaggcccttgtccgtgatgcgcacacactgtccaatgttgagcgtgcgcagcccgtgcatctgccgcaccatgcggttgatgccatcatcactgatgtggcaggagcagagggagagagacttgaggccatccagcccctgggctatgtaagccagactctggtctcccaccttgtcacagaacgaaacatccagccccgagaggcgcaggctgcccatggccagatgcatgatgcccgtgtcactgatgttgtcacaggagcgcaggttgaggctgcgcaggctgcccatgtgcgacaggtgcaggaggccagcgtccgagattcccccacagaagctgaggttgaggagcctcaggcccgtcagccctcgggagatgtgctttagagaaagatctgtgagcttctggcagtcctgtagcgtgagctgctccaggcccaggcagccctccgccgcgctgcgcgtcatgccggccaggtgcccgatgcccacatccgaaaggtggcggcagctgcggaggttaaggctcttgaggcgctgcagaccccaggcgatgagcagaaggccagtgttggtgatgttgctgcaacctcccagctccagcacctccaggcccttgaggtactgggctatgcggcccaggctgctgtcagtgatctgcttgcagaggctcaggttgagagcgcgcagggagccgatctcctgcacaaacgcgtggcccagcccgttgtcggtgaggttgtagcagccgctgaggttgaggctctcgatgttggccatgccctggatcacgtagctgaggctgcggcggaggctcaggatctgcacccggcggatgccccgggcctgcaggctggggaacagcgacgggttggcccggcgcaggtgcagcttggcctccaccccccgccacaccgacttgtggtaggcggcgtcccgccaggcggtgcacacctgcgccgcgcgccccttgtcccggacgtccaggtagccgaagatcatggccagcagctccgggaacaggcatgagatgtgggtctccatcttcctcctcccccctccgcggcgctggggggaggaggcgcgggccccgccgctccggcctcgggcaggcgacgagagcgcttctccccagccgccgccgccgccgccgccgccgcctcgggcccaacggccggcccctccccgccttccggctccggccgccgccgccgctcctcctcctggtccgtccgtccttccttcctgccggctgcgcctccggcccggccctcccccgccccgggctccgcacggcgctcacatcccgggcggggaaggcgcctcgctctcgctcccggaggccggccgccgccgccgcctcggctctacccacgccgcgcccgggccgcgccgctccgcccgcgccgccgcgcccacgccccctgccgcatcctccgcctcctgccgccgccgctgctccgcgggccggcgggcggcgagggggccccgggggccgggcgcacgggctccgggcgcggaggaggcttcctgctgcctttgtctctcgcccgcttttcaaacctcccagccccgggccgcccgcactccgccgcccaggcggggggaccaggaggccaatcccggccggcggcgtgcgttccttctcccccgccgtccgcggccacttgggagctgccggcccccgcaccaaggacgccgcggccgtccggccggagcgcggctcggcgcagaccccgggcgagcaggcgggccgtgcgtttggtagcgcccgggccggccccggctccgccgccctgcagcgcgtcccctccgccgctcccgctcccccgcgcccgcgcaatggtacgggcctgcgctgccggaactgtggagccgttgccctggaaaccgagttcggcctggtcccgtggcccctgatttttaaccctgtgggcgccacgggggagcggcagctgtcagcagagcgcctccccacccggcttcttttcacccggtagcccgttattgagccgttccctctctgggccacgccccagccccgttccttctttttctttgctgttgaagtctgcgcagccccttcccacagtttacccctgcaattcgttacccttatttcacacccctctcccttgattatccctgcgagagccgcctcctatagcagtgctcaataatcgtcaccccaactctccttttcttactgtccctaatgccccttaacgcctcattatcacaccccctgctcccccggttggggctgtttactacgacgcctttctctccagtcttgtgtcttaaattggagagaaactcggctgtactcatcttaaacaatgaccccctccagtcggtgttctagaaatttctagaattatccatgactacttccttctagcatcttctgatggtttccagacacgctgtgtgtgtttccctcggtacttgatacatcaaaacttccctctacttctgaacgctgctgcgccaccaatgccctcagtccgctttgcttacaggggaacagccttcccctaagccttgttttaggagctttctccttgtcatcagccttagactatcagttgtatggctcagttgtactgatagtcaatatattcgtatatgctgaatccaatttactttttgattaaaatggaatgacagttgaacttggtttaagacaatccagtcgtgtctgttggtttatcaaccgttttatggaagcagggcacaattccattctaggatgtagcccctgggtcctaaatgtccgtactaaggatagaatttcagaagtttcattttaactacccccaaaccaagaatttttggatcagagaaaatgatcctctgtattttaatttatggatccacacaactagatacaagaccagcggatttatcagaaagggaaaatggtttcattgattctttgaggacctgaacaagatttggaaggggttccatattcagtgtaggagagtaacttttgcccaagcaaccactattagaccaaatacatacagattcagtaataggcataatacaccttttacacccctaccactcctctttcctaaatcaggaaatgcagaagcaaaaattctcgccagcttgttacctcacccacattacacgcagtgtggagcccatagatttttataaccttcttgaaaaaatagactgtactgttagtcatccagtacatccagatgtacggtggcagtaagtgtcacgattctggggtatgcctgggcttcactcttctcctggaggttatctaggcttttattcttctcagtcacttctgcctaaacgtttaccttaaattctgcgcaaaagtcactttttgattgttctgtgcacctagatgtgtttgggttgatgtcaaggccttaatccaaagcaccttagtgtaacttaatcctgcttaataaaaaacaaagtaccccacacatttggggggaattttagacaaggggcctgaccagcctcggactaagaaggagcctaatggttttccttctctagaaaggcccttgttctcaaatctgaagagtcattcagaggtatctggaagcactttctctagaagttggccatctggtcctcgttctaacaacagtttttcttgaattctagaatcttattaacacaaagccttttatttaaggcactcaagtatatattataaggattttcagcaatatgactattttcaccttcaataaataggaaaatatagcatcaagaagcatcacagaaaaagcattcccggggaaaaggaactagggcgtagaatgagccctatgccgaatctgaacacctggtgactttatgctactgaggaaacgactctcctttctgggtctcggtttccttgtgtaacaccaggatgatttgactaggtaatcttcagggacctttccagtaggaacactctgaggccaagagcctagcatactgtctccttaacccatggaacaattacacattgttcctaatgcaggctccagatattaagaataacttcgaatacaataacttcctgggagctttggtttatgctcagacttaggacacaaaaatatatgaagaatatgtatagacaggagactctgattgtctggcaaagatgtataccaatgtagaaaatcctgtggcttgctcttcatatttttaaaactggttgagatttttgtatatgatttaacaagttgcaaccataagttttttaactagcctatttaaaagcagaaatgatagccttgtgtagggagtctctccaaagccttacaaagaattttttttttaattctagatttttcagatggaatgtgcttttcacctgggtagggtgggaaaattgagaggcccaacccaaagatcaggcttacctaaggattcatactttctccttcagaaggggaagacctggcaggaaagatcagaagagctctgtagcttttaactcctcattcaagtatatatatatatatatatatatatatatatatatatatatatatatatatctccaaaaatagtggcccagagtctagtttatgggttgggtcagaggagttaacataggccgggcaaagtggctcatgcctctaatcccagcattttgggaggccgaggcgggatgatcacttgaggccaggagttcgagaccagcctggccaacatggtgaaaccccgtctctactaaaaaaaatacgaaaatattagccgggcatggcagcacatgcctgtaatcccagctactcgggaggctgaggcatgagaatcgcatgaacccaggagacagaggttgcagtgagctggtactgtgccactacactccagcctgggcgacagagcaagagaccttgtcaaaaaaaaaaaaaagttaaaatattttgtgtctattttccttgaactctagtgtatctatggcacaatgcctgctatgtagtagacattttgtcagtgttgttgaactgaagtgaatgagatggataatataaataataatctctttatgaaagacttcatacatatcgaaacttcttcgagagttctgggcagccattagtaatctgaggtttataataaaatgctgcctttccaacttcaaggtttcttgagagtaacattcattctgttgctcagtatttctaagtaggagagcatctctctcgacacttcttcgtgacagaatattaaagataagagagggtgaggatttgattcactgattgcaaataaaagatttaagcagaaacaacaaccaaaaaaagcccaatttaaaaatgggcaaagggtttaaatagacatttctccaaagaagatacacaggtgatccacagcacatgaagagaggctcaacatcattagtcattagggaaatgcaaatggaagccacagtaagataccacctcatatccataaggatagctactattaataaaacagaaaataacaagtataggtgaggatctggagaaagtagaatcctggtgcactgtgggtgagaatgtaaagttgtgggccaggcacagtggctcacacctgtaattccagtgctttgggagactgaagcgggaggattgcttgagcccaggagttcaagatcagcctgggcaacatggcaagaccccatctctcttataaaaaattgtgcagctgctatggaaaacggtatggccatttctcaaaaaattaaaaatagagctaccgtatgattcagcaattctgtttctaggtatgtacctaaaagaattgaaagcaggggttcgaagagctatttgtacatccatgttcatagtaatgatattcgtaataccaaaagttagaagcaacccgaatgtctattgacaaatgaatggataaacaaatcatggtatatactcacaagggaatattattcagccttgaaaaggaaggagattctgacacatagtgagacatggatgaaccttaaggacactgtgctaagttagtaagccagtcacaaaaggagaaatactgtacaattccacttatatgaggtatctagagtagtcagaattatagaaacagaaaaaataatcattgctaggggctggggagagggctgatgcagaatggggagttgtttaatggatatagagtttcagttttacaagatggaaaagttctgaaaattggttgcacaatattgtgaatatacctaacacttctgagctatgcacttaaagatggaccaggcgcggtggctcacgcctgtaatcccagcgctttgggaggctgaggcgggcagatcacctgaggtcaggagttcgagaccaacctgaccaacatggagaaacctcgtctctactgaaaatacaaaattaggcgggcgtggtggctcacacctgtaatcccagcactttgggaggctgaggcaggcagatcccctgaggtcaggagtttgaggccagcctgaccaacatggagaaacctcgtctctactaaaaatacaaaattagccgagtgtggtggcacatgcctgtaatcccagctactcgggaggctgaggcaggagaatcacttaaacccgggaggtggaggttgcggtgagccaagatcgtgccattgcattgcagcctgggcaataagagcaaaacttcgtctaaaaaaaccaaaaccaaacaaacaaaaaaaggttaagatgacaaattttacgttgtgtgtactttacaattaaaaatttaaaaaagattttagcaggacaaacattttgaaataaagatagaaaaaaagagagaaaaataggtgaaaagtattcttacatcaacagattgccgggaaccccctgagatatttgagatgttcccccaaattattagcttgctgtatcttgtaaatgtaggcttaggatcatctttatccactaccgtaaaaataagggcttgtgatctgggtagccagagccttcccgtgagggtgaatgtgtgctatattgtccacactgggaaacccacggaggtgaaagggggtgctgtactattagtattcacgcccgatggatggtcacgcccttttactcttgaaatcgggttgccatttgtaatttgttatttgcagcttttgagtgttaactataataggtgtttttgtagtttcaggcacccaaccaaagaatcagaaatacggtaatagaataatctcagatatcaggtattgtttgttcaatgttgacaaacaccttaggtacttgttacaaaacaggtagatagaacaactctaggaaaataaagtgtgttgtaaatgtagccatttccaggtcaccgaacacttagaaagacgggttttcaatttattcaatcattcaggctgggcagggtggctgtaatcccagcactctgggaggccagggtgggaggattgcttgatcccaagagtttgagaccagcctaggcaacatagcaaggtcccatctctacaagaaataaaaataaaaataattagccaggcgtgatggcatgcacctgtagtcccagctagtcaggaggctgaggcaagcgggaagaccgctgggccaggaggtcaaggctgcagtgaactgtgcttgcccccctgcactccagcttgggtgacagagccagaccatctctcgagaaaaaaaattcaggaaaatattaatacaaattatatacattgctctgtgctatgaaataaacaaagatgtagaagattacgtttttgcctttaagaacttgggatccagcaggtgagctagaaaatacctgtgacagtgacagtatttgttagtgttataagtgccagcagagtgatagaaataaagttctcagtttggaggatccatagtgaaacctagaatttgaataggtgttgatgggaagaatgtcattacattatagtggaaatttttttagagaataggctgaagttttatattgtttagaaaaaaataagaacattacaatagcaaccatgtattgtcatacattgttatggatcttccatattgaggcatcagttaatctaaaaaatctaaaaaatcactttcctaaagaattcttggcttttatttttcccaagaataagagatctggctgggcacggtggatcattcctgtaatcccagcatttggggaggctgaggtgggaggatcacttgagcccaagagttcgagatcagcctgggcaacacagggagaccctatccctacaaaattaaatttaaaaaattagccagacacagtggtgcgcacctgtagtcccagctattcacgaggctgaggtaggaggatagtttgagcccaggaggtcgaggctgcagtgagccgtgatcacaccagtgcactccagcctgggtaacagagagagagaggagagagagaaaaaagagaaacctttaactcttatgtatctggaattggaaattcagtatctgaagtcagaaaattttaattcatggtctggactttgcaactgtttttacaaccgagattgcctcaaaaaaaaaatttgttttagtcagctctctcctcatttgccccattcttctctctaacaatagaaccagacaaggatggaaaaagagggaagttcagggtgtcctgcctgtggcgtccacgtgtgactctcccctacgtgcccgtgctttctgttcccattcccgtgagctgcgttcacaccatacttggagtctgaagctgtgtgtttgaatccttgccctcccactgtagtctgttgcctgacctatggcaaagtcactcaattctttgagcttcaatttcctcatctataaaacgaaagtgattgtcgttcacggagctgtggtgagatgcgttaagaaaacatccacgagaaaggaagggcctagtgcatgcccggcacatagtagggacctagtaaatgctgtttttgtttttttcttgtataaagatgcactttgaaaaagaaaaaaaaaaacccttacagatgtgcctcagaattatacagatgtacatttactgacagtgacacttttttaaaactgtacttcctgttttaaagaaatgtgcaggttcgaagctgggcgcagtggctcatgcctgtaatcccagcactttggcaggtcgaggcaggcgaatcacaaggtcaggaattcgagaccagcctggctaacttggtgaaaccccgtctctactaaaaatacaaaaaattagccaggcgtagtggtgggtgcctgtaatctcagctactcgggaggctgaggcaggagaatagcttgaacctgggatgtggaggttgcagtgagcgagatcactccactgcactccagcctgggtgacagagcgagactctgtctcaaaaagaaaaagaaatgtacaggttcaaggactggaaacataacaaaagcgtaggcgcataagagaatgatctttcaggtagagccagccatgtgtttgcatcttatcttctcctctgtaagtcaggaagggtagcatgttccattcatgcgcaaagaaatagtccagaactcctcttctgccagacatccatccgtcctgtggccttggacctatggtttcactaccaactcttactctttcttttttctgagacagagtcttaccttgtcgcccaggctggagtgcagtggcgtgatctcggctcacggcaacctcctcctcccgggttcaagcgattctcctgcctcagcctcccgagtagctgggattacaggcacctgccaccacgcctggctgacttttgtattattagtagagatggggtttcactatgttggccgggctggtcttgaactcctgacctcaggtgacccacccgtctcagcctcccaaagtgctgggattataggcgtgagtcattacgcctggcccaactgttactctttcttttgcttagcgtggtgattctgaagcttgactaggcatcagaataaacttgagggcttcctgatgcaggacatctggggagaggcctgagaatttgcgtttctcacattgctgtcagcatcacctgggaactggggatcacagaactgagaatcgctggtagaacctcctagtacccaccttttttttccttctttaaaacttttgttaaattatacttcttaaaagctctctcttttttggcaaaattaaaatcctgtaggacaaaactatagtcccccgcccccctccatcttctgtcgtttagatcatgagctcctctgatacaaaggttgaaattttctccagtggtatggtggaaagaacttaggttttacagtcagatgaattctaggataaaatcttgactctgtcacttattagctctatgactttggacaaattatttaaccactaagaggctccattatctcatctatgaaatggaactagtgatttccaaatcttgggagttttgtgagggttgactggggtaatgtgtgtaacctcctagtatggtgacagaccgtaatgaaaacagcctaatgtttacagagcattgattgagcagtaggccttcttttaaggtctttacatttatgaacttccctaattgtgacaacagctcattttacagcctatgaagagggttcattactatctccattttacagatgaagaaagtacagcccagagaagggactggctcaagaccaaacagctggccgaactggaatttgaattctgtgatctggatctagagcccatatcccagccaccatgctttgctgtgttaacagtataagtttagcagtccgccttgctaggatgcagttactctatgatgccacgtaaagagaggtccatgacacagacagataaatgccacatgttctcactcatgtgtgggagctaaaaacaactgagctcatagaaacagaagtaggggtgaggcactgtggctcacgtctgtaatcccagcactttgggaagccaaggcgggtggatcacttgaggtcaggagttcgagaccagcctgggcaacatgtggagacccccatctctacaaaaatacaaaaattagcctggcattgtggtgcgcaccagggatcccagctactctggaggctaagatgggaggattgcttgagcccaggaggtcgaggctgcagtgaggtatgatcacaccactgcactctagcctgggtaacagagggagaccctgtctgaaagaaggaggctgggaagtgcagcagggaggggagggcaggagtaggttggttaatggatgtaaaattacaactagacaggaggaataagttctagtgttctaaagcaccgtagggcgaatatagttaacaatttattttatttgttcaaaaagctagaagagaggattttcagtgttcccaacacaaagaaatggttttcgaggtgatggatatgctgattaccctgattggatccattacacatagcatacatggatagaaatagcactctgtgctctataaatgtgtacaatttttacatgtcaactgaaaataaaaggaaaaaaagatgtgcaaatatgttttgagatctttaaagcgccatgtaaatgtgtggtatgttttgcttgttaggagtactgctgtcccattatgtatttgaacaactcctcataaagtacctttggcttggggaaaaaaaagagttaacagtgagtgtcatattgaccatactgtgagcaggatctggtcacggtgaggcatggtgatcatggaagacactcgaaggctctggttggtttgctagccaaaataggtcagagtgtgtgtgtgggggggggtgagagtgtgtgtgtgtgtgtgtgagagtgtgtggggtgtgtgtgggggggtgagtgtgtgtgagacagtgtgtgaggggtgtgtgagtgtgtagggtgagtgtgtgagagagtgtgtgagagtgtgtgagagtgtgtgggggtgtgtgagagtgtgtgtgggtgtttgtggggggtgtgagagtgtgtggggggtgagtgtgtgtgagtgtgtgaggggtgtgtgtagggtgagtgtgtgatagtgtgagagtgtgtgggggtgtgtgagagtgtgtggggtgagtgtgtgggaggtgagagtgtgtgagagagtgtagggtgagtgtgtgtgagagtgagtgtgagagtgtgtggggtgagtgtgtgtgagtgtgtgggggtgagagagtgtgtgtgagagtgtgtgtgtgagtgtgtgagaaagtgtgtgtgtgagagtgtgtgggggagggtgtgtgtgtgtgagagtgagtgtatgtgagagacagagggtggtgtgtgtttgtgcctgtgtgagtgtgtgtactgcagggtagatatcctgatacctgtttcatgccttcaggcccacagctggctgtggcctcgcaggaccaggaatgcgtttgtgtgtaattatgtcaccctctagcggtgacttccctactagccctttatccttgaaaagcccactcgggtgtcggtgacctctcttcccagtgacagcccgggagcagaacttcggggagattctggcatggagggacagtgctgggaaaagcggggtgtggccgggcatgaagagagtgccagggcccgggaagagtgaaaagtacaactaggactaatgaggagtgcaccctgccgagcagaaggggaagcaggagcgggccaggcacagcgtctggagaggagggaagagaaggcgctctcaaggggaggctcttgcgtgtcaatttctgccaagtgccattttatgtctgtggggtgggacggttatcgcagctagagctctttccagaatgtcagcactgagggccgaagtgggcgtggagaagcagtttcaattctgttttccaagggaagtaggcacaggtttagaggctgcctggagctgcctaaattccaaacgttcaccaccgtggagtggactgctgacttggctgcttctgcctagcctggggctctgttccctctgccagtaaaggtcattttatcaggatcctcagaggctttcgcatgttgataaatatttcaaaagacaagggggaatcaagatcagtcttactgagagcggatttggaactccgcgttcggcgggacgctgccgcccgaggcctgactgagccacagtgcgaagggtgctccctttttgaaaaggtgctggcgccaggccaggctttgctggaaagtcctatctggatgagtcagagcatttacatttcttacataatgtcagacccagaggagctttagggatcagcccagctacagagttcacagccaggtccccttttctgccaagaggatagggttaaaggttttaaaaaaaacaagcagagtctcaaggggcagaaaagcgaaggctcagagttaatgctgattaactcttcacaccccagaaaagatggttctgaggtaaaaccacacctttatgtcacatgatgccactgccttcctgaatccagtcattcctaaagaggtcagtaacaccaagcactgaccttcccgccttgtgtgcaggaaattaaagaggcatgaaaaccctgtccacattttctctaaagttggaacagcttgcctggggcttcagactgagcttcaatctcaagcttcagtgagattctttgttgtttattttttatttttaaactatttggccaggcgcggtggctcacgcctgtaatcccagcactttgggaggccgaggtaggcagatcacttgaggtcaggagtttgagatcagcctggccaacatggtgaaacctcatctctactaaaaatacaaaaattagccagtgtgatggtgtacgcctgtaatcccacctgctcaggaggctgaagcaggagaatcgcatgaacctgggagacggaggttgcagtcagctgagatcgagcaactgcactccagcctgggcgacagagcaagactccgtctcaaaataaacaaacaaactaactaactaactaactaacttactattgaaggccaaagagttcaagtaactaacataagaaatcagtggctactgttgtaaccatcaagaattctttaatgggccaggtgcagtggctcaggcctgtaatcccaacactttgggaggccaaggcaggtggattacgaggtcaggagttcgggatcagcctggccaacatggtgaaaccctgtctctactaaaaatacaaaaattagctgggtctggtggagcacacctgtaatcctagctactcaggaggctgaggcagaattgcttgaactggggaggcggaggttgcagtgaactgagatcacgcaactgcactccagcctgggtgacagagcaagactctgtctcagaaaaaaaaagaaagaaagaaaaaaaaaagaattccttaatttccttaatttaactggttcagggaacctaaatgagagttgtcacataatagcaaatcttagtgaccagatgacactcaaagcaggtgtaaatatttaacaaaagcactgtgtagacatttaatgacaatggttgctttttgtttgcttgctttttatttgtttacaaatgaaaataaagcagagaatgagaagtcactttctcagggtcacgggaacaattcaggttgaacgcatctctcctccgacatgccgagcgtctttgagtctcctcacccaggcgcacactcaggattgcagtcatctgctattgttgcctttatttattttgagacggagtctcgctcttgtcacccaggctggagtgcagtgatgcgatctcggctcactgcaacctccgcctcccgggttcaagggattctcctgcctcagcctcccgaatagctgggactacaggcatgtaccaccacgctcagctaatttttttttttttgtatttttagtagagacggggtttcaccatgttggccaggctggtcttgaactcctgagttcaggtgatccacccgtctcggcctcccaaagtgctgggattacaggtaggagccactgcacctggcctattgttgcctttttacttgatatttcaataaatttgtgagcaattggaatggtaagaaattcgctgcagtacataaaagtttgatcacttagactgctgtgtgattagggttgctcagtgatcttccggcaataaagggaggaaaaggagaaatttcagatggagtgatgatggatgtcctcaggcatgtcaatggctgctgaagtgctatgggaaaatggaaaacacaatctttgggatccctctttcagccattttcctgcttttatatctataaactttaaaaagtagggcatactttaaacaatagtatactaagaaattgtcaccgctggcagagccaaaattgaatcagcttgccttgtgattacatcagaaatgtgtcttagtctgtaaagcttcactacaggaaatgcccaggagctgctaataaagtttaatacacatttgcttccttaatgctatattaacatcctgaccatcacaactttcattgtaaacctattgcttattaaaaacaccctgtaagatgtcacaaactgacagaaagttggggctactacatgaattaatatgctaactagtatttttcagtgttatatagtataagatagtaagtgcttgaaatatgagcattttgaaatccttggccagcataatcccatgggtaacactgaattatccatggctgtgggagagagcaggtggttcacttccaaccatgggttgtgttccaaactaagggtttttgtttgttttgttttctttcttttaaagaaaatcaagtttatttttgaaactgttcattttaattctaagacaaagctagaaaaagaagaatggaagatctggaaaaaaagcattgtcaactgtcactgtcctaccatgggaaagaaatgtcttacaaacggaaaaaaaagttggagagaacgagaagtttctggtgttatgtaagaggaagcgcccagattacatataaaagtcaactgcttcacgccctgttactaaatattagggatgcaaaatacgtggtggcagtaagtcagagcctggtttcctaaatatttcttacatgttagggatcctgagagatccctaaacaagtagaaaattcttttttttttctttttgagacagggtctcactctgttgcctaggctgaagtgcaatggcataatcatggctcactgcagcctcaacctcctgggatcctgggctcctgggctcctggggtgatcctcccacctcagcctcccgagaagttccactacagccagccaccacgcctggctaattttgcatttttagtagagacggggtttctccatgttggtcaggctggtctcgaactcctgacctcaagtgagccacccgcctcgtcctcccaaagtgctgggattacaggtgtgagacactgcgcccggccaacaagtggaaaatactatcctgaatgagtgtgtgtgtgcctgctgggagaatatttcctagtgtttcctagatccttgttagttgacttcccacccacaaagccccagaaggagtaaactgtctctaaatatcagaataaacaacaacaataaaacaacttttatattttcatttctttttctttttgttttgttttgttttgttttgttttgttttttgagacagggtctcactctgttgctcaggctggagtgcagtggtgtaatcatggctcactgcagccttgaactgctggtctcaagcaattctcctgccccagcctaccaagcagctgggactacaggcatgcgccaccacacccagctaattttaaaattttttgtagagacagggtgtccctatattgcccaggctggtctctaactcctggtctcaagtgatccacctgcctcagcctcccaaaatgctgggatttccggcgtggacctcactgcccagctaaaacaacttttaaaaggtatattagagatccaactagattctactcttgcatttatctgcagcatatcagtttggtttgcccatggttaggtggttcttggtctgggtcttagtttcatgcgtctatgcatatgtggaaactcatcaagctgtacatttaagacttgtgcgttttaactctgtgtgttttgtttcaattttaaaaagtttttatttatttattttttaagtcagaaggggtttaatgggtcaagaaaagtttacttctgtgcacacaaattatctcaaggtctgtttgttcaaacagggtaaccaaacagggaccgattctacagtggctgctgcccggagttttacacagatgggagcatggccgtacccctgaaccctccaaccttctcttgcctgtgattaccactccttccctggccttttctggcctggctgctttcactgctgaagtagggcaaggattttgtttctcttcattacccttcaccttgccaggcctctgttcatcccatccctcggcccctagtacaaagtatgcagttagcactccataaatattgactttaattttgattatttttctctggttaatatgtgttgggggccgggtgcggtggctcatgcctgtaatctcaaaactttgggaggccaaggtgagaagatcacttgagcccagcagttcaaaaccagcttgggcaatacagtgagatctagtctctttttttttttcaaaataattaaaaataaatatgtgttggggtgggcagtgagtgcgggaaagaagggggaaagggagattgtttctaatgtacagacggggagacgtctggggctgcgtaggagctggggtgaagagcacaaggcattctggttttgcctctgtatttgataatgttttcttaatgttggaaaaatgcaatagttttatcatttgccacataccttcccatgctgttccctactgaaccaaatcaggtcatattatactggctatgttatactgcgctgttttccattgactttttggttattgatattggcttttagtgttgggtgtgtggtttcttttcacacaaacatgaatacgttgtaccactgagattttcctaggggttcagtcattttgagttggagatggtcattgggatgcatttttacattcctgttctcactttctttttttttttttttttttgagacggagtctcgctctgtcacccaggctggagtgtagcggcctgatctcggctcactgcaagctccgcctcccgggttcatgccattctcctgcctcagcctcccgagtagctgggactacaggcgcccgccaccatgcccagctaattttttgtatttttagtagagatggggtttcattgtgttagccaggatgaccttgatctcctgaccttgtgatccgcctgcctcagcctcccaaagtgctgggattacaggcatgagccaccatgcccggctcctgttctcactttcatctgtgggtgccacccagagcataggctttctatggaacagtgaatgtgcttacatatgagtagaagaagcgaggtttttcttatgcagcccgggagacaaggaaaccgctgtgatgccgtgtgccaatagcatgcatttatttgtggtatatcagagcctcagatccagccatcccagacagtcacgtccacaaggatgagacccttttgcaggagacagagaacacacctcccttattcctgctccagcagttgagatctgctggagacccttactcatgtttcctggacttgaactttaggacactggccactgggcattttttgcagagggtactcattagaatttctctttctgtcagttttttagcctattttttaagctaaatttctaaatgcttttgaaaccaacggtgttgttttattttgctgatagaacccagatgcgaggagggagttgtttttttttttttccttccatcatttgaatcattgcacaagcaccgtatcacctagaaacagagggtgatttcaggacagtgctgtggccacaaagcatggttaggtttggaaaagcagcagggaaaaaaaaatgccttctgattcaacacttccgttctatgtgatttaagcacatatctagttacaaggtttctttggcaaaaacaattttttgctctggagttagccaggcaaagccagcgtccccctggccagttgagtttgaggaccatctgcctcacacatcattagcagcattgtttgtttagggcccttctgtagaatctttattcatggagaagtagaagaaaactcaaacagctcagctggatttccaggtcctgcgtggaatttgtaacccctttgacttctcaactgagaaaattggatgcggctgtcacagaaagagaataaatacggaaccccacaatgctatgcttgcagccacttttattccattgaatttcacacataatgaaaggcaggcatactctgagaggcacggagctgaaccagtgctgggagtcctgcaattccaagtaggttgagctggtgataattctgggcaaaatactttagtcctctttagttggccgctggctaaagcatgcgggcagtgatacggctcctgttatcctactgcgagtgttctgcttttagaactaagaaaacggtgaaagaggaaagacaagtgattagttaacacctaaaagatgtatgccctcacgaataatcaaagaaaggcagtttaaaatttgatagcattttttccctattgtgagaaagaattttttaaaatgataatatccaaacatcttaattagcttttgtcatttaaagctaaaacccagtttagtgttttattagacttgactttcatgaaaggttgggaattctaaaaataacttattttgaaagagtaatgaatggcccaacaaacttaatggtccagttcaagctattggttgactggtcaatagatgctagagaagttaggactggaaaagacgttagggcttatgtggctctgccctgtcattttctaactgagaaggctgggacctagagacgttgtgtgacttgtctagggtcacacagttgtacggaggctggaattgcattagtaaaacatgatgagttgttatttagatcttgctctcagcaaatagcttcatataggattaaactttttgttttcaatacctcaaggatgttgagcttccctgtctttccagacagacaggatgtccgagacctcaaatcaggcactgttgcctcatttattctttgtccttagatgaacgagtggctggatacctctacatctttagaaaaaaattttttgagatacagtcttactctgccacccaggctggagtgcagctgcatgatcgtggctcactgcaacctccaactcctgggccaagcgatcctcccacctcagcctcctgagtagctgggactgcaggtgtgcatcaccatgcccagctaatgtttttatttttgtagagataggggtctcactgtgttccccaggctggtctggaactcctgggctcaagtgatcctcccacctcagcctcccaaactgctgggattgcaggcgtgagccaccacatccggcctagatctgtttaatggggataataatcctggcacaattgatgtccctttgataatcttgaaaccccttgagcaactacaaataaaaataaggcatgtacagtctaaaagggggataaacgtatataggtaagtctaatacaaaacagaataagtgttgtaagaggttgtattagttaaggtcttgaggttcctgtaacaaacaaatctcccaaatgtaaattggctctagaatcatagaaatttatttctagcccatgtaaaagccaaaatagatgttcattattatcaggcaggtctccctctggtaattttggggcttgggcttcttctgatttatcactctacctttggcctggttttgaaggccaccatgcttgtctgcatcaagctgaaagaagaaaagcgagcttggaggtctcctggttggagatttttagaggccaggcctgggagctgcagacatcacttcttctagtatacctttagatagcacccagtcatatgaccacctctttgtgcagtggatgctgggtaatgtagtccagcggtgtgcaattttagtgaccatcaagtgatctctgctacaatgggctttgagggcccaaaggaggaggacgtcatatgagagtgaagtaacttattggacaaatacacacatgcctaggagggtggaaataattaataattatttctactattaaccgtgattttgtcttaattttaataagagggttatatatctcttacatattacagataatcttcaggaatcttaggaattcctaaatttatcctaatatttaggaattcctaaattcctgaaaataaggtgggatatgtatctcaatttgtttgtattttcaggagtggtgactctttctgatccatggcctgtgcttacaagatagccggatcccatggagatcacacctgctccagctgtctcatgcagcttgggaggtgaccacagaaacagtgggccctccccaaagccacatgcggatagactatagtcaggactcttcatctccattcagcagtgaccagaggccagcggcccgaggcctgtgctggtggtttgttccagctgcggacatttgtcatcccttggctgcataaggcacagaccacacctcctcgtctcctttccactcaggctgacagtgctctccttctgccccttgtagtgtttctactgaatcagacctcccagctgggctcccaccttccagatgcttaccctccacactccatccatcattattggagcaaacgattaccagagcttttctaaatccacatctgatggtgcctctcccctgttcagatgcctcggatgtctcctgcagatgacaagagacgcccaaactccttataagggggccccaataggaaggttctgcttcacgaagaattaatgacttttgtttgtctttagattttggctttggttctctctctctctctctctgtctctctttctctcccccttccctcttctgttttctgaagttgaattttggacttgaaactacgtgtcatgtgtttttcaggcctctgtgcctttgctccttgggcgggtctcattctcctatctccagctgtgagaatcctgtgtgtcctcttagggacaggttcaaataccatcacccccagaaagcatccccaccgttggaacgacatagtctttctcagctgtttggatagtaattgatacctccattataacgtattgccctgctaaatgttataatcacatatgtttgcctcacctctacgagattcctgttattcaaccaagagttcctgttactcaactttgagtaagacctaatagatgctcaataatattagttgacttgaattaagagtcacagaaagaattccatttcgattactttttggcattttcactgggtctgaactttttcgtttactctgagtagcaaatttaaaatagcaaacaatttggttctgatcatgggaaattgctctcaaggtcattgcagaatggctgcttttcctaaagattacctgcaatgatggaagtataggttgtcattggaatagaaaatggttgtctccatggctggtaggtggggtcttgctcctgggcggtaggttagagtttgctacccttaccttgagtgccatggtactttgcaagtaactctgttaaagctcctactgcaccacgtttaaacaatggatttcaaatggaactttcggttttgtacaagtgatgatttgtgttcttgcctggcttccactctagaccagcactatgagacagtccataagctctctgtgatcatggaaacgttctataatccgtgctgtccaaaacaatagccactagccacttgtagctactgagcccttgaaacgtggcttctgcaatggaggaactgaacatttaatttaaattcatttttaatttaaatagccacatgtggtcagtggctaccatcttgggcagtgatattgagttcctaggagagtagcattgtattaattgattggaatatcctatacagtactgtgtattgagtaaacctacagtaagcatgtgttaaatgatgaacagttaacatttattgagtgcctgctgaatgctaggtgcttcccagaggctgtccttgtgttaccttcattttctgcagagccccgtgctggggcagcatagacagcaagcttgacccccatcattgcagccttcaccaagaaaacaggcagtcgagggagcaatttagcaagagggtcaggagttccgtgaaaagaagcctggcagagccataaaagaaactaaagaattttggtggtgaaccaaaagcctctgtaacctgcccaggcctgaatttggtgatcatgcttttgcctgaggcagccacagaggttatttaattctcaaaactagggcctgtgagacccacaaacctggtctgaggtttgctagcagggactctagttttggcaaagggaatgtgaactgcttagcattggagggggagacaggagagctgaccaccttggctctgaatgttctcatcggtgaggaaggaactggtgctgtgcctgagtgggcgtgaacttgttttgcctgtggttttctttagaaagctgcttggttcctcttctctcaaaggatttggaaggtcttccccgcacaatcaaaggagcagtttgagacacaggggcgacagctggggacagcattagagggacccacattacttagagctactggtttccccccagataaaaacccaggtgtcgtttctgcatgagcagtgagtgacgaggagaattcgcttgcagcctctccgctacgctctgcctttagagtccctctagccgtggtccctgtgttgccgcttgcccctgggtacctgactgatgaagacaggctctggggctcgccgttgaaggtgctgtggacccaggggtgctgtccttccgctgttccattcattgcaacattcatctcctgcctgtttacaaaaatgaagcaattatcctattcttccaaatggaaactgctaatttttgaagcagaaggttgacagcttcagtaagatctcaagagagcgagaagactggaatcaggtgaggccataacttcttatctaaacttagtttctggggtggaattacagaattgcttagaaaaagagtcaatataactacttgcagaaaataccacctgtaaaaatccagatttataaatggtgactatgcatttagtacaatgattatcatatatgtaatatataaaatatatatataatatgtatattgaggtccctttaaagaacagcatgatgggctggctcatgcctataatcctagcagtttgggaggctgaggcaggtggattgcttgagcccaggagttcaagactagtctgggcaacatggtgaaactctacaaaaaaatacaaaaattagctgggcattgtggcatgtgcctgtagtctcagctactcaggatgctgaggtaggaggatcacctgaccacagagagatcagagctgcagtgagccatgatcacaccactgcagtccagcctgagcaacacagtgagaccctatctcaaaaaaaagaaaagaaaaagaaaaaagaactgcatggcaaatttgaaagtcttttggaacatgacttgtgaatgctccaaacattccaaaatgaatgagtgaagtagccaggagaaagacagcagagagcagtggggatttgggaaagttagagaacctgtgtgccacccaccaagacattcatattccaaagatttgtaaacattgtgttagtcaaagacacttgggctgggcgcagtggctcatgcttgtaatcgcagcactttgggaagcctaggagggaggattgcttgaggccgggagttcaagaccagcctggacaatatagggagacccccatctccacaaaagaatttaaaaacttaaccagacacagtggcttacacctgtagtcccagctactcaggaggctgaggtgggaggatcgcttgagcccaggagttcgaggctgcagtgagctgtgatcatgccaccgtactccagcctgggtgacagtgagacgatgtctccaaaaaagaaaagacagctagctgactgccagttggtgatcctggttttaaaagttgcatggtttccccaggtcctttaaaaatacgctccattttgcaaacacagtagtacctctacttggtagcacaagacacatttttattctaattagcgcatggcatagagagaggttatccacctgcccttggtggtgatccagaagtccatttatttacttcattcactctaagtagacaggaatttgcagaaaacagtagcaattgcacaaataaatgtttttcccctatagtacaataccccagaactctagatctggtgaaaatagattacttgcaggacaagagcatctaaacacccctcaatcctccagcccttgaaaacaaagtccatagccttgttctcttgaaacaattcctaaaccacactgacctgtgacctatacacttctgccttcttttctagagcatattttaaaactattttattagtattcaggagaagggaacttcctctttcttatcatctgcacagaataagacttccagtggacttttgcttgatacctggggagaaaattgtgcttttccaagtaagatgagtcatctgagatctgccatttctgggaattgtacagggacccagagtcttagggatctgctctgcctactttgtggaatttattctcacagtgcatgagttggtcactttcacactgctccaggcaccaggagttggaagctggaagctctattctctggaacatcaggcattagattttagtgtgaaggcctcaggaattgtttctgcgctcctgccaccctgcactgtgattgggtctgttttgctatatacttcccaaattgtgtaccttatcactgggaatggcacacacatttctggggaagggtagtttagcatttttcttaagggccagaatttaaatctcatcactcctaccaagcccccagcccctcccaccaagcccccagcccctccccacccctaagacatttcttctcctgcaagccagagaaacaatgagaaaagacacagaatatttgggagatgaggcttcccaaaggactgctgcaatcatggtggagctgatacaaccctctccccgcccaattttttattttcatttctaccaactgtagattatgcatacacacaagcagatcacacaaaagaatactatgcctcagggctaggaggattcattgagcaaagcttggaaggaagaactagagagaaacctagagacagagaccctcgggagaaataattaaggctggcagggaaaggctgtgttaattgagctgagaagaaagatgagcatccggggattctcgtaagaggtggtggaatttgcagataaagtcattggtacattattggattcatctttggttactactttttaaaaatgttttttggggaagaatgctatctagaaaaaaattcatgcaagagaaacagatagctacagaactaaatagtaataactgaccaaaaaaaaaagtgagacagagggtgattttgccatatcctcatttcctggactgagcaagagaggaagcgaaatgctgagtcggctcctggcgtagcggctgccattcatgtgccgttgatccaggcctggcactgcgagagcaatacccattggtttgcacagaactccctcccaccagccccacctgccctcaaatagtcatcccacgtggttgtctctacctaaatttcccaacatgtttctttttgagtatgaggatcttcttttttaagtcaaaaaataaaaataaaaaaggtcacatgccccatgagaccataattgtactttccgccaagaaaatataatatataaagaccttcaagccattaggtattaatatgacttttttatttttaaatatttttgttgtctaatataatgcagaaaattgcatacagcataatacatgcacaacttaataaactgctgtagtgtgaactgccacatatccatcaccaggttggaaaatagaacattgctggtatcccaggaacttcctcgagccccttcctcatcacagccccctcccttggaaaccactccctgatgtcatcatttccttgcttgcttttctttatggcttaaccaccaatgtgtgggtccccaaacaagatagttttgctatgaatggaaccatagttcatatactttcttgtgacttgcttcttctcaatattatgttcagaagatccatgcatgtggttgcatgtaacttgtagtttgttttccttcctgcataataattctttgttgtaatatatcacagttaattgttttgtccattctattgttgatggatattgttgcttctggtctgaggctatcaagagtgctgctattcttttgttgttgttttttttttttgacatggagtctcagtttgtcacacaggctggagtgcaatggcgcgaccttggcttactgcaacctccgcctcttgggttcaagtgattctcctgcctcaggctcccaagtagctgggactacaggcacccgccaccacacccagcaaattttttttttttttttttagacggagtctcgctctgtggccaggctggggtgcaatggcacgaccttggctcactgcaacctccacctcccgggttcaagcgattctcctgcctcagcctcccaagtagctgggactacaggcatgcgccaccacccctggctaatttttctattattggtagagacaggtttcaccatgttggccaggatagtcttgatctcttgacctcgtaatctgcccgcctcagcctcccaaagtgctggcattacaggtgtgagccaccgcgccccaccctgttattttgaaagttagagaactgccatggggaaattcatttatcctttcaagagataagaatgggacataagatattgcaatttgttagagaaaaagaggtcaattagcaggctcttgtagtagctcatagtatgacaataggaatgttgagtagggaatatattcaaaaaacactatagagatacaatcaagagaccttggcaattgatttgacgtggaaggcaaagaagagggaggagtcacaaaggataccaagatttcaggcctggatacaggaagagaattggaagacagagaacacgcatgattgatatgaaggtgtgtaatcaatcagcattttaacttctatatttggctctctaggaagattcactcaacccacattttatgatcaaaaggacagtatccagggtgactggtcccctatgtctttgaccccattcctgcagtgttgcccccagaaactggaagcatgtcatgatgggagttttcctgggtaattgatgctgaattatcaatgggaataccaaatcagattttttaaaaagttaatttaacatttattatttttagagacctctgtcatccaggctggagtgcagtggtacaatcatagctcactgcagccttgacctcctgtgatcctcccgcttcagcctcctaagtagctaggattacagacatgtgccaccatatccagctatttttttttttttttttggtagagatgaggcctcactatgtcggccaggctggtctcaaactcctggcctcgagtgatcctcccatcccggcctcccaaagtgctgggattacagatgtgagccaccatgcctggccccatattagattttggagggactacataaatttcacgaacaagcaattctgaaaacagtggaaattattgaagtcctccttcattgcactatctctcctcttcttcgaaaagcaccttgaaattttctctttgaccaaaccacatcttcatgtgaaatcctttctgctgttttcctcctgttaaaagccctcatattcttcaaggccctactcaaatcccacatcctgagtacagctgctcccttaggctcttctgacacttctttttttttttttttttttttgagacggagtctcgctctgtcgcccaggctggagtgcagtggcgtgatctcggctcactgcaagctccgcttcccgggttcacgccattctcctgcttcagcctcctgagtcgctgggactacaggcgcccgccaccacgcccggctaattttttgtatttttagtagatgacacttcttatagtgtacttttctgggcaggttttctgttttccccagctagaccaatgcaccttggggcactccccaaggtcttacacatttttacattatcttattaagcagtgccagcctttactcttagaagctgaatgttacttatgtctttgaggaaaagacagagagttatgtctgggaccaggaatctccaaaatctcaattagcagtggattctcagataaggggaggtacagtcaagcagcttcctcacagcaaatggaccaagttgtatggaagtcgaagggactctccttgtcttcatgagaggctggccttcgtggcctgcttcctctttccctgagagccagaggagggcttttcttttctttcagtcaacaaatatttttctagcaactcccacatacccctgtgtactatcctatccactggggagaaaatggtaaataagaccgtttccagagcatatgagggacagaaacaaaagcacaacagatgagcatgccacactattccatgtcacattaaatgctgtggctaaaacatgtgagaagctagaaatagaatgatgctgctgggggccttctttggcagagatggttagagaaggcctcttggaaggtgtggcctcaatgacaaaggagcttgctctgcacagagagaggagaaaccattcccagaagtcggcaaggcacagcggggagaaacaggatgggtttgggtaaggaggtatcaggagtttggggttctaaagcacagcatgaaatcctaaagaggatggaaaggttggcggggccagattctggaaggcgtcatgtaatggggtgaggagttatgactcatcctttaggagataggaaacctttgaagggttttttgttgttttttttttttttttttttttttttgagacggagtctcgctctttagcccaggccggactgcagtggcacagtctcggctcactacaagctccgtctcccaggttcacaccattctcctgcctcagcctcccgagtagctgggactacaggcgcccaccaccacacccagctaattttttgtatttttagtagagatgaggtttcaccgtgttagccaggatggtctccatctcctgacctcgtgatccgcccgcctcggcctcccaaagtgctgggattacaggcttgagccaccgcgcccggcctctttgaagggttttaagcaaagaagtcacatggtcaaatctaagctttgaacagagctcctcgatcgctatatctactgaaaggcaagacagttttgtgctatcgaagtaagagcctttcttgctgaggacatagtttcttggtgagtttcactgttaaggccaatctaaaatgtccctccacgttctctccaaaccttatgtttcttcacgtgcactctgtacctcacctctgcatcttccatgagcccctcacaccaaaccaggatccacccttccagacccatagctcttgacctggtttgtcttttccatcccaaagtaaaactaagtaccaactctttaaaactattatgttttaattcctccagctttaagcagcctggcctgttctcaacccacatatcattttggctaggggagaagtctagttctttccgcccacaaggctgtgtgtgtatctaagtgtgtgtattaatactagtaactttgcatgttttgtaaaccttgctttttgtgatatctcctgcatatcagaatgttgttttctgactttcacactattcgcagccgtagtaacagggcaatggtgcaacgaagaaaagaaagaggctgggtaccgcggctcacgcctgtaatcccagcactttgggaggccgaggcaggtggatcacctgaggtcaggagttcaagaccagcctggccaacatgatgaaacccatctctactaaaaatgcaaaaattagccggtcgtggtggcaggcacctgtaatcccagctactcgggaggctgaggcacaagcatcacttgaatcgggaggcggaggttgcagtgagctgagatcatgccacttgcctaggcaacaaagtgagactctgtctcaaaaaaaaaaaaaaaaaaaaaaaagagaaagcagagaaggtgttatgctctagtgacagggaggacctgtatttggggaagagtagaaagatctggattccaagccagggtcaaccattcaattgctgtatgaacaagtacttaattttagtttccctgttttcaaagtgagaataataatggcatatgccacaaatgttggcagagattaaatgagaaaaatagatgtgaaacatttagtgcagtgcactaagaggtgctcaataaatgttgattaatactagctattgtcactggttatcaatcaaaagacatttgttactgctgagtaaaaccatactgggcgcaaaggggctcgcagagaaagtagaaaaggtaagtttgaacctttaggaagcatttgatctactagagaagtaagaagtatatacttcacctgagaaacagcccaaggcagcataagtggggtagggaggtgcagaccagatacatggattcataagggccgaagaggttgagacctcttcggtctcaacccatgagaatgagattctcatggggtggggttaatcaagcacagttttatggagggagtgaatcttgagcctggatgtgaaagtagtttaatatctggattgctgcagagcagaggagaatgcttccttgggaagaggatcagaatgaggtcttgggggaaaagtggggtttgttctaggagtagaaggacattggaaaaggagacttcatgttgggaaattcaggaaaacaatgagaggtaagatgaggccacattggaaataaagaactgggaaccactatacgttttcaaataggggaatattatgatgtaaaattagtattttagggaaaactggtattgtgtctatgtgcacttgtgagtgagaccacgaagaactactctggtgttcagatgccagaagggtgagtactcacctggaaattgggaaggaaatgagtgaacctgatgtacattttaggaggtatttgtctattgtgctgaggtccataaacagtctttctctacagtacgagaaatgagtggccaaagggagagaagccacaggactccagctagcaaggcctgctcctcctccacctgcccctcccctgtcccatggaaatcatccagtctgaggcccctccttcaacagcaatgcagccaggagttcacaaagggaagcatttcctttccaaagactgctaagatggtttaccctgttatgccaggaatgttaacaaaattgcaaatgtacttttattcttttgttttttctcttttttttgagacggagtctcactttgtcacacaggctggagtgcagtggtgcaatctcggctcactgcaagctccacttcccaggttcaagcgattctcctgcctcagcctcccaagtatctggaattacaggcacccatcaccacgcccagctaatttttgtatttttagtagagataggtgttgccatgttggccaggctggtctcaaactcctgacctcaagtgatccacctgcctcagcctcccgaagcgctaggattacaggcatgagccaccgcaccctgcctgttttttttctctctctttttttttttttttttgaggcagggtctcaatctgtcacccacgctgaagtgcaatagcacaatcacgactcactacagccttgaactcctgggctcaagcgatcctctggcctcagcctcccaggcaccaccatgctcggctaactttagatttttttgtagagacagggtctcactgtgttgcctaggctggtcttgaactcctgggctcaagcaagcctcccacctcagcctctcaaagtgctgggattataggtgtgagctactgcacctggccacaagtgtatttttttttttttgagacagagtttcactcttgttgcccaggctggagtgcaatggcgcagtctcagctcactgcaacctccacctcccgagttcaagcaattctcctgcctcagcctcccgagtagctgggattacaggtatgtgccaccgtgcctggctaattttgtatttttagtagagacagggtttctccatgttgatcaggctggtctcgaactcctgacctcgggtaatccacctgcctcggcctcgcaaagtgctgggattacaggcgtgagccactactccaggccaagtgtatttttttttttttcagacggagtctcactctatcgcccaggctggagtgcagtggcacgatcttgacccactgcacgctccgcctcccaggttcacgccattctcctgcctcagcctcctgagtagctgggactacaggcgcccgccaccacactgggctaatttttttgtattttcagtagagacggggtttcaccgtgttagccaggatggtctcgatctcctgacctcatgatctgcccgcctcggcctcccaaagtgctggggttacagttgtgagccactgcgcccggccgccaaatgtatttttaaattacacattctatagctccccactgggtgaccaagtaagagtgcttttcttttctttcagtcaacaaatatttttctagcaactcccacatacccctgtgtactatcctatccactggggagaaaaatggtaaataagaccgtttccagagcatatgagggaaagaaacaaaaccacaacagatgagcacgccacactattccatggcacattaaatgctgcggctaaaacatgcaagaagctagaagtagaataatggcgatgggggccttctctgggagggatggtcagggaaggcatcttggaaggtgtggcctcagtgacaaaggaggcctgctcagcacccttgaagaggtccccacctaggctcgtggctatttctggacaggtttctggatgtgacggtgcctgtctgaggagaggggcagatgtgggaggtggctccatttcctgcaggagtcttgagatgcttgagtccctgggtgctggggaagtcagttctagatatcagtgggtttgtgtgaatggctaatgacctgaaatcaacccctcatcctgtggggcagagatgttgtttcaggcactgctctgaagtatggtggaaagcacagagttgcttggggtctcagctttacctgtcccggtctctctttttggtctcttaactctaggctggatggacatggccccttaaggaaatgaaagtgagtgactgagtcctagcagaaaaaggaggagatcttggagttcctgtcttccaacacgcacctctttggttgtgatggtgaagtgggacagtgccatctcagcagggaccttggatgtgctctagagggggtcttggaggtgtagcatcgttacatcccctcccaccatcctgcctacacagtggttttgggggcacagatatttcagagagtagtcttcccaagaaccctacatcaagtatgctaccaccccttcccattcttgattctggtcccctctttattttcctcatagtattcactggacctaacttatgatacatttgtttgttcactgccatgtctctggcacttagagcagtaactggcacatattaggcacccagggtgtaattcatttgattaatgaatgtattgaatggctgcatggatgaatgaagaggaggaacagagcagatgtctgaccagctcattctggcttctggaaggatcctgattgggaattttgcatctttccctccccacagcctcctagtcactactactaaagaatagagaccctgactcccacttttttttttttttgagatggagtcttgctctgtcacccggctggagtgcagttgtgctatcttggctcactgcaacctccacctcccaggttcaagcgattctcctgcctcagcctcccaagtagctgcgactgcaggcatgtgccaccacatctggctaatttttatacttttttattacaggtgagctttcaccatgttggccgggctggtctcgaactcctgacctcaggtgatctgcccaccttggccccccgaagagccccgcattcttaactactgtgtttggtatgtttgaattgacacttgcctcttaggaaggggaatctttttagaccctggggaaatctgtagttattgcaaaggccttttcctgcctgttgggcatttaccagatctttcttcctacacaaggagagcctcccctggttgaatcctgctataaatctcactagtgacccacaaacaggggtcccaatgtgacctgctcattaacacaaaaccgtcagcccccatacagcttcctgccttcccagtcgggttgaggcaagaaatttccattctgcccatgctgatgaaaccagtcgccagcatttacctttctaaggggtcctttctcctcccaccccagcccaccccagcacaagaatgtaagagagggcaaacagctgcctggcttcagttctatggccactcaagaattggctcgcatctgtctgccaggacagagagcgtcctgagggggctggtgtgtgtgttgtgtgtgtgtgtgtgcacgcgcgcgtgcatatgtgtgtatgggggagttcagtttcaggtaccacacatctggaagtcagagaaagaagccactgcacatgttagagccattttggggggcaatttttaaaaaaaaaaacatttttaatgggctgagagccgcctcgtggaaagcccggggcgggggatggagtagaaacagctgcgggagtgattcttgtctccatatatgtttataaggcactgagggcgggattagcagctcctgggaagtctggctctagttaccgtgtcagcctgtcctgggggcagtcacagccacagtgaccattagcaggcacccaggcctgtctttggctcggaaacggtggcccccaatgtagcctagtttgaacctaggaactgcaggaccagagagattccactggagcctgatggacgggtgacagaggtgagaggcactggtgtgagggacaagtgtcacaggcggggaggaagaactccgctatctggtggtggaaatgtgtgaggatcaaagtccccagggagagtaggtgttgcgggcggcagggtggtgggctgggcacgggctgggcataggctgggcaggaggcttcggggccgcggggaggaggctggagaagcaggagggcacgggcggccctagctctgcaaccccgggaaggactggtaggtggagttaaggatatttggacaaggaaacgctttgaagcttttctctcgtcctccctactcgggacctggtcgcctcccctccataaaaccattagctcctggtgccagccctatctctgctccatctctcgtggttccagccggtgcattcacagaccttctgccccgggggacgaggaggatttatggggggagaggagagggggaggggcatcctccagaggagggggggtctgaggggagtcgggcgtggaagctgttagtcccgggctgggggccggctcacttccgagctggctctgcatgacaaaggggaaggagcaagtgtcttctttgatctgccccctgccggccccacacacctgcctgttggtgcccccgccccagccgaggcttcgagaaggaaaatcaaaagggggcttggggaagggctgtgtcccagctctcctggaccctgctcgggccactgtcctctcctggcggccccaggacaaaaatacttcccgggctgatgacccgaagcacccgccgccccctcccggggagcctggggacgccgacgcgcgagagtggcgcagtgagccggggcgcgcggggctgcgctcgtcaggtccggggccccggggaggccgctgggggcgcgggtcacgcccagacgggggccccggaggaccgcgggggagccgcaggggccgtgtgtcccgaggcgcaggctcgctctagcagcactgacctgctgcgggtcccagggcctggggacaggggctctcgggggcggatagaggaacaggcgtgggttacagcaggcaggaggccaagaggcgggaggcccgggagccagcagggaagggctgtggcatctggaagatgcgtcctcagctcaggcatttgatgccagagctgccgcctggcgtcggcagtgtccccggtgcagctgctgggcaaggtactcggtgccgccctcgaggaccacggtgccgggaggggcaggggccgcctagggaggcaccacctcagccgccagagctttccgggcgggcggttcgcggcgtggcttgtacatttctcagagaagctgccttgagaaagtgaaaagtccttgatctgtacgcaggggttgggacttaggaaacccgctgagggtgagaagggcgcagatggagaggggagactcctccctgggtgcaggtaaatccaattcaccaaaatgttttaatcctacaaaggagagcctgagggtcagagaaataagtctctgggctggaatgagaggtaggcacgtgggggagtggataggatgggccccatttctttggatgttctgcagcaaggacaggtatgctttacaacagccgaagtggcctcccggctgccgaacggaggaacgccgcaagctccgctcttgaaattacttgttttcatttctctttgtggtttctcagctcattatttctttggaaattaggtcctgtgcagggttcccacagtttggggtaagagacagaagtcctagggtgggaagatgagcagtgggaggcggaggctggaaagaggccgagcttctttgtggggaacacgcagcacgtaagcatcagtgcaactttctccgcctcaccccggctcctggtctgcccttatccgctgagtttccacactgactctccatttctgttttctccagggaaccctactctggaaactgtcagtcccagggcactggggagggctgaggccgactatgcccagcctgctgctgctgttcacggctgctctgctgtccagctgggctcagcttctgacagacgccaactcctggtggtgagtaagaggggctgaggtcctgcctgcacagccggaggcctccttcagcgactgagatgaggaggaagggcaccgtgtgtcacggtagtaccttgattcctgggagtactaagggcctcttttatcccaggaaaactaagaacgctctgtgtctctctcaacccttatctttgtaagggttccctgaggataaaggttccgttcatttgatttttttctctaatcctgtccacattccttttccttggaccttccctcatgcccatgaattgttagaaattgctcttgggtcaacaagaatatcaatacttggtagttttttgttcctttgttttgtgtgttttgctggtaggatatagaattcctcttttataagtctgaaggccagatgaggggttcacagcaccatgggtggctggctttcttcttatgttttaagggctgttgtcattgccaagttgacagggaaatggcaggcgatcaccacctattttgcatggtctctgccactagcatttttactcagatagcaaatctgcagccttctcatctaacactctatatggctggtagatgatgagcaaaagggagagcctctgaactggtggagagtggatgaggggaagctcaaagtgagacatggcagtgaaaacaagtagactagatcgtgatgtatgtaaagtgattggattttaaaggcccaaagggagtaccacgcaaaggattgattgctttccatggcttatcatgtacttgggctgcactgaactagtcactcctactcattgaatgaggcctgtgctctcctgttgaggtttggctctttttgccctctattaaaatgaagagctgctccccacccctcgtcttcttatctgcctgacccccattcttaagatccagttcaaattctggccatttccttataaaggcttctcttcagccataagggctattttcctatctgatcacagcagatccagaagcatatccagagtctgtctggggcatttggcatctcgcatgtcctttgtgttcatgcctcagattccttcagtttgtcctttgaaggccagcactctgatttactaatttttctttccagggccttgtacacagggacgcattcaataaatgtgttgaatgaatgacttaatgctgcacacaggcgtatgctcactcctgggcctttttttcccctttctggattgctgtcctaggtcattagctttgaacccggtgcagagacccgagatgtttatcatcggtgcccagcccgtgtgcagtcagcttcccgggctctcccctggccagaggaagctgtgccaattgtaccaggagcacatggcctacataggggagggagccaagactggcatcaaggaatgccagcaccagttccggcagcggcggtggaattgcagcacagcggacaacgcatctgtctttgggagagtcatgcagataggtaagaggccattacaagagggctcggccaaggaactgcactcgtctcgtttgggagcaattaagctctctcaggactggcacagggagagcccaaaggcagcctaagtgggctctctctaggcttggcagcagtgtgcaccacgagagaggcacacgaggaagcaggctctgggaggctgcagaaaccacacgcttgatgttcctctagctctctgccttccagcctcacttggggcaggttgcttgggactcactgagagggggcaggttgcttgggactcactgagagggggcaggacatctgagttgacttagagtggattaggagagccgcccaccgccactgcctttgtgtctcagtgcaaaaaagagccttgggtagagaaccagaaattgcagccctgaatgtctgttggatttttgcctcttccacttcaacctttgacagagagatagaaatgtcggccaaagtgttgatagctgtcactaacccaaccccatccagtcccagctttttcttttgaaagagatgtgtgaacatgggggaaggggtcagacgaaagaaaagatgagagggagagggccaagtcttctggattcctgtcccttcccctctcccactgctggccaaggattcttgggccaccctattgcttagatggaggtgtgatctgaggtctaattgttttaggtccttttgaaatgcaatcctctcctctctggcaagaaattgagaaatccggccctattctactgggtcttatccccagggccataaaagggaagtgttagaatgctgtgttccttctgcctgacattctcccagaacacctcccttcaaaaggttacctgaggctggagtttccccagagagggatttcagcctgggaggggagttggggaggtagagatttcttcgtgctcctctcttagggaggatacttggaaggctccttccccctcccacttattccagacctctttccctaccctctctgtcccatattgagaagtaatgcccaatgcagtagctcacgcctgtaatcccagcaccttgggaggctgaggcaggaggattccttgaggccaggagttcaagaccagcctgggtaacatagtgagacctctgtctctataaaaaaaattttttttttctaaagagagagagggaattaaagatgggaaaagtacacattgaaacttgctgctctcttgcttccttcggtatcaactcagggtgcataaaaggaaggtcctagtgttcctggggcagctttcccaaaagagtagacttggggttttagtgggatttactcatagtttattgattcttctcaaacccacctggcacttgtctcttctttctggcgaaaatcttggcagcacttcctgccctgcgttttgggcaatgaaactaggacggcccaggtgcagagtctcctctaatctcttcagtggagttaatgtttattgaagacctaaagtaggcctgatgttggctagatccttttcatgtgtatttcgtgtgcataaaggccccaaagtgaggctgtactttaggaaagaaaggggttggcaggaaaagacactccgctgggttcagatgtgcactaggtggccagcgaaagcaaaccctgtcgaagagagcccatctctctgtgccctattccgttacaaaatggaacccttctgtttgcctaattttcccccttcctttttatagcatcactgaaggctcatgctacctaggaggctgtcctcccttcctcccccctgagcccagagtagctcctggtgagtcctccctctccctatcttgagaaggaccgtctaaggcttcctttctcctttgaagctgctgcaaaagtcggtcaccagagggcggcagagcagctcggaggagcctcggcccgttgcccagcttctgcctagggagtttggaggcaacttgggctgctatggaacagagagggcatgaaattgttctgctgtctcctgtagggaaaagacgcatgtccctctagtagctcacggctgcttttttttagccgtttattcttgagatggttagagattcaacctgaactgttgcgtatatagataaacccccacgttgcttatccattctgaagccccgaattatctctttcttgctgaaggtagcaacagtagatggtacttagtaggcttacccaagggcccaaaggctgccccgtgaaggcagagctgcccacactcagcttctgatgaagacccgactgaaagaggcaggcagcgcaccggaggacaaatcaggatcccaaacagtcatgataggttcgaactgtcagagtacagaacgtctggtgtgttagttcagctgcaggtacgtgattttagaaggcaattctgagaaggctgattcaactctgaaaagcatgtttgctaaagaatgatagaaataaatcagacatatgtagcttggaaaagtgaaaacgtaaaaggcttaatagttgttttcaaacactgaagagctgtcaaatgggaaagggattatagcagagtgcaagtgcagcaggcaggaatcataaggaggcgtatttcagcttaatacaagaaggagcattctggtgattggagtcatttgaaaaagatggaatggattgctttgaaaacctagcccactggtctgaggaactgtgtagagggaaagcttccggtggctatggagggtagctcggggctgaagcttgggaggctccctccgttccaggatgccatgtcaggtggttgaggctgcattttaaggagatgaattcctcaaagtggggcccagaccctcctccctgagaggctctttggccatcttaccatccccagtgctccttgtcacattctgagccccgtagaccgggtcctgtcggctgaatcatgagtgtaacttcctgccatcatttcggtttttcttgggctattcctatttcacaactgaccagaagccagccactggttaatagagaaaaacggactcactcagcatggtctgtttgtaaacttcactgtgtcatgcccagataatcaagaagtagggccaagggagagatttctctagacctctcggttgattgcagactgcttccctttctaccttccaagacaagactctgggattctgcctggtttaatctctgagatcaggattgaatctgtttcctgctaagaatcactcccttctctccatatctaagtccctataagtatcatttgttatttcttataacagctttattgagatacataactcccataccatgaaattcagcattttaaagtgtaaattcagtggctttgagcatattcacaaggctgtgcaactatcagcactgtctaatcccataacattttcaccgctccacagagaaactgcacacccgttaactgtcactctgcgtaccccaacccccaaccctaggcgaccactattctttctgtctccatggatttgcctatcctgggcatttcttataaatgggattatagaatacatggcctttggtgacgggctccttttacttagcacaatgatttaaaggttcatctgtgttgcagtctatatatatatatatatatatatatatatatatatatatatatacttttttttttttttttgagacagggtcttactctgctccccaggctggagtgcagtggtgtaatcatagctcattgcagcctccaactcctgggcttaaacaattcttccacctcaacctcctgagtagctgggactacaggcacatgctaccatgcccagttttgttttgttttgttttgttttgttttgagatggagttttactcttgttgcccaggctggaatgcaatggtgtgatctcggctcactgcaacctctgcctcctggggtcaaatgattcttctgtctcagcctcctgagtagctgggattacaggcgcccgcctggctagtttttgtatttttagtagagacagggtttcaccatgttggccaagcgggtctcgaactcctgacctcatgtgatccatgctccttggcctcccaaagtgctgggattacaggcatgagccaccacgcccagcttaatttttttcttttttaatgtttttgtagagatggggtactgctatgttgccaagctgttctgaaactcctggcttcaagtgatcctcctgtctcggcctcaaattgctgggattacaggtgtgagtcaccacgcctagtcactttttatggctgaataatattccattgtatggataataccacattttgattacccatttatccgctgatggatagtttggttgtttccaatttttgcctgttatgaataatgctgcaagaagcattcctatgtccatttttgtgtggacatatgttttcctttctcttgggtataaaggcatactttcgagatattgtgggtttgcagatttggttccaccgtactgcaataatactgcaataatgtgaataggcaataaagtgagttgcatggttttccagtgcatataaaagttatgctgcgggccgggcgcggtggctcacgcctgaaatcccagcactttgggaggcccaggcgggcggatcacgaggtcaggagttcaagaccagcctggccaagatggtgaaacctcgtctctactaaacatacaaaaaaaaaaaaaaaaaaactagccaggcgcggtggcaggtgcctgtaatcccagctactcgggaggctgaggcaggagaattgtttgaactcgggcagcagaggttgcagtgagctgagatcgtgccactgcactctggcctgggtgacagactgagactctgtctcaaaaaaaaaaaaaagttatgtttacactattctatagtctattaagtgtgtaataacattacatcttaaaaaaagtacatcccttaattaaaaatactttattgctaaaaaatgctgacacagaaacacaaagtaagtacatgctgttggaaaagtagcacggatagatttgtagcagggttgccacaaaccttcaatttgtaaaaaacgcaacaccggccaggcacggtggctcacgcctctaatcccagcactttgggaggcccaggcgggcggatcacgaggtcaggagatcgagaccatcctggctaacacggtgaaaccccatctccactaaaaacacaaaaaattagctgggcgcagtggtgtgcctttgtagtcccatataccggaggctgagacaggagaatggcgtgaacccgtgaggcggagcttgcggtgagccgagattgtgctactgcactccagcctgggtgacagagcgagactctctctcaaaaacaaacaaacaaacaaacaaaaaaacacaacacctgcacagcacaagaaagctgagcatagtaaaacgaggagctttgcctgtgttcttaggagtggaattgctgtgtcatatgggaactctacgtttaaccttgtgactgttagccttagactgccagactgttttccaaagcagctgcaccgcttaaccattcccacccacagtatgggagggttctggtttttccgtgttctcaccaagttgttattggctgtctttttgatgatagccatcccagtggaggtgatttgggcttgcatgtccctgatagctgagtattctgaaacagacattttactgaaatagaacatacattatatgaatgttgaggtggttcaccacagcagtaaaggggaacatagttgggattttctgctggaaaatgatctgcgtatttagagggaccgtgatgagtgtctggaattgtaggtgctgtagatgttgttcccagggctcctgagttaggaggcagtgtggatcctgtggaagagagaggaagacagcttggatttttctagacattgtaattctagttcatttttgactcctggcctctgccactgtctagctagataatggcagcagtaccgacagacagatgtgcagctcatagagcgtgagaaatggcatctgtgagggagacatttctgctaggatacaacgtcctactcttgataccatgatttcttccttagcctcattctgttcgactcccatgttctgtgtgtttctgaatgcctattctcccctccgctgaggtctcccgcctaggaatctgcaggtcacacaggctcttctgcagtggatattaatgcaggccaggaccggagggacttgtttttttgtgtttttttttcttttttttgagacagagtctcactctgtcgcccaggctggagtgcagtggcgcggtctcagctccctgcaagctccgcctcccgggttcacgccattctcctgcctcagcctcccgagtagctgggactacaggcgcccgccaccacgcccggctaattttttgtatttttagttgagacgaaggtttcaccgtgttggccaggctggtctcgatctcctgacctcgtggtccgcccgccccggcctcccaaagggctgggattacgggctgagccaccgcgccgggccagggacttgttttcttccgggtggtttcgcagggctgagctggggcccagcggcggaagtaaaacagcagatttcagcccattataaagagacgtttccaagcgttagagctacgggaagcgaagccccctgccccaggggtgtcagcagagccgtggcgtgcgggtccgtcgggggagacggggggaaggacaggtccccgggagaggagagcgcacccgcttaccgccctggcctcattctgcaggcagccgagagaccgccttcacccacgcggtgagcgccgcgggcgtggtcaacgccatcagccgggcctgccgcgagggcgagctctccacctgcggctgcagccggacggcgcggcccaaggacctgccccgggactggctgtggggcggctgtggggacaacgtggagtacggctaccgcttcgccaaggagtttgtggatgcccgggagcgagagaagaactttgccaaaggatcagaggagcagggccgggtgctcatgaacctgcaaaacaacgaggccggtcgcagggtaagctgggcctccccggcctccccagcactgcagacctagggggctgttcccgggctgtgccaccagccgtggcctggccttcaaggaaacgggttagtctgaccgtgaagattcttacctacgattgcaaatttacatgtccacgttattgaacaaatccttttcaaaatgccccacttcccaatgggcatacgtgctttttcttttcttttcttcttttctttttacttactttattatttcacggttcctagaggacttaggtgcaatgtttggatcagaattccagacgtaaggattagagcagcgctcttgtcttggccacccctcctttgcaacttgaatagataatgcgatgggatgtttaggccgttagacctcatctagggtttatgctctgttaaaggctctggtaatagcagagtcgactttcaagaactgctgtcatacgtatccagaacccagtcaaaaaacacattcaaatactaatgacaaacacacttctgagctaggagattttagacataagtggaagtgtgagaagacagccatctgtttaaggctggaggaaacagcctccccagtctcatgtaatgtgactgtcttttaagcctcagtttcagcagaagcaaccatgcaggtttgaggggagctgggttcattgtatgtgcagagcacacctgggcggcagcttctgggcccctaggtggcatgctggaaagcgtgaaccctctctgcctgcaccttgttcctgaaaaccccccctctgagcacacatccagcctcctcttttctttgctgtcccccatcgtggctgcctctgccacacaagactggagggcctgccccgcaggaatctctgccttttgctgcttctgcatagccagtgttgacagggaccgagggcaacatgggcgtccacccgggtttcctctgagaaaggtctgcggtctgagcactgggtggtgagaggctctttctcctggaaaaagagctctcaggaaacagcacggacttctttcttggagtgttgtccccactcgggtctatgtcaagccagctggctctggttcccaggcgaggtaatgtaacaaagatgaactcactcaaaaatgagaatggtggccgggagcagtggctcatgcctgtaatcccagcgctttgggaggccaaggcaggtggatcacttgaggccaggagttcgagaccagcctgaccaacatggtgaaaccctgtctctactaaaaatacaaaaaattagctggacttggtggcaggcacctgtaatcccagctacttgggaggctgaggcaggagaattgcttgaacctgggaggcggaggctgcagtgagcctagatcacaccattgcactccagcctgggcaacagagcaagactccatctcaaaaaaaaaaaaaaaatgagaatggcaatttcttagaagtttaacggtggcaccctggtgattcagtaacaggatatgaatataagcctcaaaatgtctttacatagcaaaatcttaaaatgtgaactcatgagaggcggggcacggtggctgatgcctgtaatcccaacactttgggaggctgaggcgggtggatcacctgaggtcaggagttcaagaccaggctggccaacatggtgaaaccccatctctagtaaaaatacaaaaagttagctggacgtggtggcacacgcttgtaatcccagctacttgggaggccgaggcaggagaattgcttgagccagaggttgcagtgagccaagatcctgccattgcactccagcctgggcaacagagcgagactctgtctcagaaaaaaatagaaagaaaaaagaaaagaaaaaaaatgtgaactcatatattggagcacatatcaaagaaatggaataggaagtgtcttttgtctgaatggggatgttgtagtattggccggatggaatgtggtgcacctgtgtgcatagcatcatcagccatgggacatcaggtggagaccagagtgggttatatgcccagggtcttccttacgcttcccctatccagaggctatttttgtttcccagaaaagggtgtgtgtaaggtggggtcagtgcgtggtgatgttaggagttctggcaattgctgatctgtgattatgataggctaacccagggcagagagcctggagccatctcagatgacttctgctcagggcgtgtgtggagccacccggtctctcaggtgtcttggctgtctcccagtctatttgcccacgtctttgggtgtctgggcctgaggagtagagatgtcaatgaaggggttaagatccgcactttatctcctgactgcccagagtcgatccagtttttgaaatcttagttgaaacactgccctccccagtccccattgttagtagtttttctcccacctgatcttcaatcgggcattcttgctcttctcaggtattccttactctatctacctttgccttggtaggttggcggtaggttcctgtgggcagggattgccctctctgcccctttgcttcaaccctgtatgtgctgtatgtgggtgggacaaatggatatacacagaggagttccgtgttgcctcctcgggagaggtcagattcacggaggctgcttgtggctctgctgagctgcgctgtggtgtctgcacgtgcctgtgatcaggcaggtgacacccactcttcccctttcccctgctgctgggtctcactttattgcccttaattgtttgttgtcttgtccgggctgttatctggcagccttccctcccatcaggcttgttcctggcttgctcaccttccctgtctgtctccccgcttagccccttccttcaggccccacacctctcctcttccttaactccttatctctccctttgcctctgcctgcttcaggttgggaattcctggccccctttattttttatcctctctccaaggaacaggcctcggccatcagtcaccatctgaggccagaggtattcactgcttgcctcctcacacctacacacaaagttctccagcaaggactgagtgatggctgggatggaaaatagacaagtattttagaaccatattaaaaagaaaaaaagattatccaggatctgatgtcttgacacagagtaaatcttaggctactttgccagaagtttctcttggcctgcaagagcatctagtagctccttcttagacggtggcggcaacaccagtggctgatggtgttttgccactcaaggatttctaagcattttccagataaaagcctggtgcctaatcctgtaacattcctgtctgtcaccaggctcagcacaccattagatagaagtggaagaggagctgagaggcgcttttccagggacagatcgtagaactaaaacttttttctttttttttgagacggagtttcgctcttgttgcccaggctggagtgcaatggcgcgatctcggctcactgcaaacctctgcttcccaggttcaagcgattcttctgcctcagcctccctagtagctgggattacaagcatgtgccaccacgcctgggctaattttgcatttttagtagagacggggtttctccatgttggtcaggctggtcttgaactcccgacctcaggtgatccgcccgccttggcctcctaaagtgctgggattacaggcataagccaccatgcccggcgaactaaaacatttttgaaagctttttttttttttttttttgctttttgaattagcagtctgggctgaaaatcggcatttccccctatcgcctacaaaaggagcctatatatatatatatatatctacaaaaggagattttgtatatatacatatatatatataaaatcagtagtaaaatatgaaaaaaattgcagatattcctatctctacaatgtctttgaattcagggaaggatggagggggtgtttaagctggtgcacttcctcttggatttgttttcctaaaattctggtccttgccctgcagggtcttgctccgactctccttccccaactctgtctgagtgtttgcccctgcaagagatgcttatccgtgctccgagttgctaagtggcaaagtgcacagtttccaacccttaatgtttcctcctctcagcagtgccagacgcctgtcatccatctctaagccaaggaccatttccagaggaatgtcaggctgcagctcagacccagggcatttgggatggaagggtcattgcaggccccatctttgaagtgtctgtcaggatggggtgtcagttcctttatgtcttggacctggagctgcccggctaagtgctggtgcctttaaccttggggagagccttccttcctcctctgctctaagccagctttaagccccgagattggagtggataagtgcttgttattctgagtcctttctgggtggccttggaggttagtgagcctctctagagcttcagtttctccaccataaaatagtgggaataattccgtaccagaaaaaactcaggaagacttttgccaacagtcatatgcactgatgatggctgtgctgtctcttgcacctgcagtggtctctgcttagctctgaataaagacacaatctgggggctcttgaaaagaaatctaagagaaacccttgaaaaatgagtcctgactcagttggtgacaatagccatgcataagaaaatgctctgcagccggcttgcgttttcatcccgccatctgcacgtctaggcctgctgccagggttggttgccatggtgcgtcagcatgctgccgttgaaaagcactctgtaagcagctttctggtctgctcttgcttttacattttgatttgggataactcaagttcaaatctactccacgttgtggcggttctgtgacttctggggtagacttgttttagatgaaccgctcctgcaggcaggcccagctgcttgcagttcccttgcacgttgcttcactgtgttactccagctctcccaagggggcgtctgggggctgctcgggaggaagacggtggtcttgctcacaaatggatggtgtatggcaagactcctgatgactctatggagttagtgactacatggtaacatggggaaagggaccatttaattctcagggtatttgacaggatcagggagagttttgggctaaccacggctatgccagtgatttctgtgataggcttgtgatacaattggattcttttttctgacttgtgctcctattacgcaaaagctggacacattttgttattttgttttgttttgctttgtttctagagatggagtcttgccctgttgcccaggctggagtgcagtggcacaagcatagcttgctgcatcctcaaattcctgggctcaagtgatcctccttcctcagcctccccagtagctgggactacaggcaccagccacagtgcctggctgtattttgttggttattatttatttgtttgaggctttgatcaagatggagatatctttgttttccgattgtgaaaaggatgcattgattgtaacaggttttgaggaatgagaaaccagtagagtagaaagtgaaagtgcctggtgccatcctcccggctgatggggacaagttgccttgccgccccagggttcttttctgtggtgcctcttttatgttttccccctgagcacctgagcatcttggaaagatctttgcatgcatttgaaaagctatctatcccctaccctaccggcccctcctgtgtactaggcctgtggctaccccagccaccctctgggcctcttccaccgggatcctccttcttactgccttctttctcttcccctaggctgtgtataagatggcagacgtagcctgcaaatgccacggcgtctcggggtcctgcagcctcaagacctgctggctgcagctggccgagttccgcaaggtcggggaccggctgaaggagaagtacgacagcgcggccgccatgcgcgtcacccgcaagggccggctggagctggtcaacagccgcttcacccagcccaccccggaggacctggtctatgtggaccccagccccgactactgcctgcgcaacgagagcacgggctccctgggcacgcagggccgcctctgcaacaagacctcggagggcatggatggctgtgagctcatgtgctgcgggcgtggctacaaccagttcaagagcgtgcaggtggagcgctgccactgcaagttccactggtgctgcttcgtcaggtgtaagaagtgcacggagatcgtggaccagtacatctgtaaatagcccggagggcctgctcccggcccccctgcactctgcctcacaaaggtctatattatataaatctatataaatctattttatatttgtataagtaaatgggtgggtgctatacaat

SEQ ID NO: 3 - DNA, 71711 bp, homo sapien
aaatgctccagatcctcagtgttcaagaacctcaggaagcttcgcagtcctgcctcgtgcctgcttgaacagctggatgtgggcaggaggctgtgggagcgggccatgccagcagaatcccgccttactctggggacttactcttgtcacagcccctggtgtcctgagggtcatttcagtgtcatgtgagtattactgtggctattggaaaggatttggtacgagtttatttgagaagttaggagctttttttaaaaaaaaaaattatctttgataaatttagtagaatattttgaaagtactttttggacagtaatgaatgaacaaattgctcctgaactagaaggagggatctaaacacatcatctaagtacaacagtatgtctgaaaaatatctctgcttgtcttttatttgccctttaaagtctgtgcaaacaaatgtgaacagcctcaggactctaagaataatatttttctatggatgtgtatggacagataaacaaaaccccaagggagaaaaaacttctatttaaataaaaataaagatcccctacagctccatcctcctttgctcactgggtttgctgtatttcattttgagataaaagtagtttggatgattaacagttgaacaaaaagaaagtatttgtgtctgtctaaatctatctctatcaatgtaatctatcttatttctctaatcttatctatctgtcttatctatcgacctaactgtccatctggttttgaatattccgtattccagccataagtagtagatcttttgcatccctggggttaatggttccttgagcagacactgacactgtgccgttcgggatcccgtggggaaaacaccctcttcctcactggtcagtgataccctgtgctcacagctctactccccctcggaatctcctgtctgaagcccctgtaggactctgggatcctccgaatcggccctctccagctccaagcacactgggatccttgccgcaggaggttgctgttggcttctgcccatgctgtgggtcaggatctgcagccaacaggcgtgggagcttaggaaggcacctggtggtttctcggtaggaaaatagtgtggagtgtgtgcaatcatgtttgaggaagcgtcatgagagggtcactgtctctgtggtagtgtccttagggaaccgtctttgcctggatcctggggtcaggtttggcatgaactctgaacttcctccctccgcaggatcttcagtagaaaggtcctgtcctgaggaaatgctcagaggcacttctcttgctgaggaagcctgcctggatgtgtgtttttgtcctcatggagatgcacatgacaaattgtgtgcaatgcctcagcacagcccaacaggttttttctgtttacacttaactagcctacgacagcgggaggaaaccttaaatatttccttttcttcccacaaacgctttatctaataaaacaaaattactgcagatgaagcagggagtgatttaaatcgtcatttaaatcaaggacctgatttggtttggcctccctgggggaccttttagcttgtgctatgctgataacgtctctacagactaaaccgaccagagcagaaggcagggtggcagtgcccgtggtggggtggacagcgtgggggccggcagtgtcagtcactgagtgctgggttggcccctcactcctccatatttctgtaccagtaaaataggttgaaactgacatcgagggcagcttcaagaaggtggggagagaccacgagggcagtaatgcagaggctgtcaccctctggagctactgctcggggactgagaaggaattcagtcttgaatacatgttaacctcagttcccgctccttatctggactggctggctcccttctgcgccaagaatctgaagcccagctctgtaaagcagcaattcccaactattttccccctaaaatacacgagacgcactcccatggggcctatctagattgcaggctgcggcacagataaatcaggctgtgggttgggcgcagttcccagtaaaaccccacttctttctctcccactcaagaaagcagacctccatacgcgtaagtgggagatggtgctctgtcgccccagcccttggcgggggactcggcctgtaaaagctgccaaataaatatttactaagtgaaagatagccctgaatccacactaatttgtatttttttaaagtcattcataaactttagcattttaactattagttagtaattaatcccaataaaccggcaggattttgtgattgtgaaactgctgcaatgcgttggtcagcaggaatatttgttagcatttttatgggctcttaaagtcgtcttagctgtgttactgataaagccagccacaggctttatcagtcctgccgttggctgtcagcgctgcctggataaactcctcatccttcccgggaagaaacttctagcaatgcttaagcaggaggccagggaagagagaatcttgatactgcctgctcaccataggccctctgggggcctgccctgtgtggacagatgcttcatttcatgatcgtatacaaatcgagagcaagagtctcctagccgcgctgagcgtggggcacttgccacctcactgctgttggaactctggagttggggccaaaggatgtagcccctcctcgggggagggcagtggggtcaggtgaagattcaagagctcctctttgccttgtcatctagttgtcctattctggaggaattttaaataaggatttaaaaaaaaaaaaggacttatgtattattttaaagagcagccttgaataggcaggcatattttagtaaaaataattttttaaccctgcggtgtgaagactgccagtcaaatacagtgatggtcattatcactcacctgcccccgcccccaggctggaggaaacagagtgcagagttagaatgcttctggagcattcatggctgccgggagatgcccgagaggacgttgagggcagggcagggtgagcagggagctagctcaccttaggagtgcagagaccatcccaagcagggtctgcagacactgacttcaggtgaccaggcatggagatggcaggtgaaacaggtaagtatgccccaaaaatgatgggaaagagtgaactgggatcacttagaaatcggaagcaatacaacaaaggctaaacatatttgagtaggagttcagggtagacacgctcttggatatcaagagcataaacagaggagctaacaaaaacactgcagagaagctccatcgccccctgtagttaccccacctagcgtggctgggagaagctgatacttcttttctccgtggattcaggggcatttcccacctattttaggtatgccagtttgacacaatgaactttagacgtaacatttcataactgcgatataatttccttctgtttttaggccttgaacaaaattttctttaatgggaaagcacacattttatactgaattctaattatgttcatcttgttttttgaattatttagctacctctaatagagagtctgaaagatgattacattccacagtactaacattttcaatggccctgaaagacgtgagatgcattgctgctactattttatcaaattattgtttctaaaatgctgttttactcttctagtaggaagagtgacttttaaaacaatggatattggctgggcgtggtggctcacacctgtattcccagcactttgggaggccgaggtgggtggatcacctgagatcaggaatttgagaccagtgtggtcaacatggtgaaaccccatatctactaaaaatacaaaaattagccaggcatgatgacaggcgcctgtaattccagccacttgggaggctgaggcaggagaatacttgaacctgaaggcagaggttgcagtgagccgagatcgcgccactgcactccagcctgggtgacagagcaagacgccgtctctaaaataaaataaaacaatggatagtttgtccaacatggtatgttaaaagcgcagagaagctgaagaatgatgatgaagactaaaataacgatgataagcaaagaactaagcaggcatctgtgcagtgattcaggaggggtgtccatgaggggcggcttcggagcagctctccctgtaacttatctcacagttccctcctcctttaaggagtcagaccacggtgggctttgctttagagacatgccactgtgtgctttgttgctcgtgactatcccttcacctttctagaggtgctcgtcttcatgtaaagtcgggtgaagctttttcactcctggagaaaagctcttacaacatttttgggacaaggagcaggtgtgcctcagcgagcctgtcattatctggggagggggctccagataacacacttctacttgctttctttagggaaacgacatggtctcctcctgtaacactccccaaaagaagtatgaaagccgacataaaatacgaatatgatctttgcattaagtattaaatataataccttcaatgtagtatttgtgcttctctctatccagttctcagttgtttagggatcttctgagggcaaaccaaaaatgtcagtaaagcaaaaatatatcaataaggcatcatactgacgaaaacaaaaccagaggttttaaaaaataatctgggccgggcacggtggctcacgcctgtaatcccagcactttgggaggctgaggtgggtggatcacctgaggtcaggagttcaagaccagctatggtcaacatggtgaaaccccgtctctactaaaacacaaaaattagccgggcatgatggcgcacacctgtaatcccagctactcgagaggctgaggtgggagaatcgcttgaggggagtgggaggttgcagtgagccgagatcgcaccattgcactccagtctcggtgatagggtgagactccatttaaaaaaaaaaaaaaatgtagttatcaattttttgtttttgaccaaaagtatttcaggaactttgaagaaaggacctgaaaattattactcaggctggtatttagtttgctgacttttaactctcagagctgaacagtctaatccttgatcattccagagtgagtttaggaatttgtagtcatttcctttttactgggtatttgcatacatcactaaccagctgggattagaatgagcagtctctcgatgctgaaatggaatgatgagaactcagggccagcctgaaatgttcatcctcatcgattaatccttaatgaacactcatgcatagatgacatcaaagaaggtcctttgcaatgtacagggaagacaaaccagcttccatagtgtacattcttaaaggaaggttccaatagaccgatacacatagttaacattttgtatttttatccatgttttgccccaagattaaacattaggagtaacgtggacatttgctcagtgtcgagggaagggtcagtgcatataactaggaagaaggctatctggcagggttgggaacgtgacctcttgccctccaaagcctgggatgctgaagtgaatgcctccaatcttgcggtgtatggacacagagcgaacgctgccctctgaatacagaccagaggttagaggttaatgaatgggtgctctctccacactcaggatcccgttcaatagcggttttataaataagggcttaaatggggtcagaaaaggacctgcatattgcttccaaactctctacatctttttgaagcaatagtgttcacagatgacatccttccacctgggaagacagagatgaagctcttgtgcttggagaactggacggctactcctggctcagtgtgtctaaaaacaggaccaaatggaaaacatagtggggggggaggtccttgctgccccctattcttctctagtaatcccttaaaaaataattgcggacccaaacctctggcctccagcacattttccacttgattagaggcctttgtgaggtggggaaagggacctgcagacttgtgtattgtgctggggcctgaaatgtccagctgggattttttcccatcaaaaggggattttagtaaaaccattatcaggggcttagaggagaaaagctgttgagctgcaagtgagggggcagattagcattagcgggcttgcttctggccccagtggaggagcgggaaggtgtttgcagccacttgcacacaagttccttagtttctctgcaagttcctggcaggtgcagaggtaggaatgaatacaggagtgggaactaacaggcttgaacaatggcacagggaggctttatctctgaagtatcaagcggaaggcagcccaaatcaggaaggactgcaaggtgttgttgatacctgcttcagtgtgtagacggccgtgggactggcctcattgctgttatgtgtggccacgtcgcctggaatcccccacccacaacactcgacccctctcgacagtcttcatagacggcgacaggaaattcagaaactgggaaatggccatgctggagtcctttaatgggcgaatggacacctttagggtggggggtgggtgtgctggtagcagctaaaagagtacagaggaaggttaggaaagcagcagcagtggctgtcagcctgcaaatcagtgtccgggctgtgtggatttgcagactgagccacgggaacctcctggggagagggtttggggaaggtcccctacaagagaaacgtgcatcatcttgggattactggagccctcagctataccttcctctgcaaaacggagcacagaaactggagtcacgtggtttggatggagaatgttgaagccaatagagtaattgctgcctgaagggcccatgtgaggaatgtcggagccggcctgtcccggaaatgctttttcctatgtgtcctctgtacactgttgctctagcttcccggcagaaatggggtgtggatgaaaacaacgttggtcctgacggctgtgagcacagaactagagtgacagccacatgcctcccgtaggacattttcaggcttgcagtgctgccacctcagaggtctcagtcacaccaacatcctcacgccagcccagtggccacattcgcaagagatttgtctagagtcaaattcaaaggttgtttctgtggttacagaaagagggcctaccttcttgaaaatgaagcccagggccgggcctggtgactcacgtgtgtaatcccagcactttgggaggctgaggcgggtagatcacctgaggtcaggagttcaagacctgcctggccaacatggcaaaaccctgtctctactaaaaaatacaaaaattagccaggcatggtggcacgtgcctgtagtcccaactactcaggaggctgaggcaggagcattgcttgaacccggggagcagaagttgcagtgagctgagattgcaccactgcattccagcctgagcaacagagtgactctgtcgaaagaaaaggaaggaaggaaggaaggaaggaaggaaaggaaagaaggaaaagaaagaaaagaaaggaagaaaaggaagaaagaaagagaaagaagaaagaaaaagagaaagaaagaaagaaaaagaaaagaaaagaaagagaaagaaaacggagtccaggaaagctgttcttggaggctatgaatcaaggagcagccctcccagttcttccgaggagcagctttaggaactgctggtcctcagcgttcacacattcccctcactcagttctcattctggctcctcagccagccccgttttcttcttcttggctttgtgcagggtgatacgtgtttgcttttctttcctttacaacctgtattctctgtttggggtgccttccctgaatctgtattctttcagtgtagtcactaagaatggcatatttcagctattactttccaaaagttgcgcagggagatgttctgctttcataagaccttcacggatggtgccaggaatgaatgtaatttgccttatgcacaggccccaagtccctgaaacttttccttttttatttattctctaaccaaaaatgacgtctatattacagagcttataagctgtggctcctctagccaatacagcttggtagaagcatctgcaggggataactgcctccaccttttttcccacttctacacctgcccttcccactcacagtttgattccccgaggccaggctgttgagtaccaggagggcaagacccgaaggcctctcctgccctcagcctgtctcttcttgtgccattctacggaatctggctacattggctcagaagttatttttgtaagttctgctaccttgtcctaatgtcagttttctgtaggaggaatttaggtcacacaagcaactttacttcttcgtcagggctgttattattttcatcttcatagactctcttatattttatgaagatgtcttcatctgggcaataaagatactccttttaataaaaattaaaaaaaattaaaaaaaagatactcctaaaattttaaaatgttttttcctgaaaggctctctagaatttgtcctcacagatacacttctgatttttcttttgtaataaaaaaaactagctctttttcttgctgtttaaattgatacctccatgtatgactaaaatttttcccattttcttcctcccaaactccccagatatggcaatctaagaaggatttgtatgaagtgccctttaagaagaattagaagtttaaagagaaaaaaaaaaaagcattagaagttaatgtttgattctcttagctccaaaagcagagagctgcaaaataacacctggctctggggagtaacctcactgatattttaaaattcaatttcatcttttccaggaagtgaaattcctcatttgtcaactcttacgcctggaggaaatactttgcgggtgcgggtgaaagagaaaggaccagaggggatttgttagatgggaggaggttgtggttccccttgggaaatagcttccaactcacagacaatgctgccacctactgacaagaccaagacatgggacgtgcagacttcgtggatttctccactttctgtcttccacagtggaggacatttagttttgcattaaccatactttattgtactaccttatattggaccctaaaatcatgttcataaacttggggtaaagaaaaacacaaggtcggactcctagttttaataactccaggacaggtgtggatatgattcacagctgcttcacaatggggaaggtaaattgtgtgtaagagggttttttgttgtttttttaaagggctggggaggctgaagcaacagtccagaaggagacaataacagttttccagccctacctttcaataatgtgtagtgcttgacttttacctcttaacccacatatgcacatttttatttctaaagaaagcagttgtaggctcctgcaatctcagcactttgggaggccgagatgggaggatcacttgagcccaggagttggagaccagcctaggcagcatagcgagaccctgtctctacaaaaaaaaaataataatagtaataatgggcatggtggcacatgcctgtggtcccagctactcgggaggctgaggtgggaggattgcttgagctcaggaagtcgaggctgcagtgagatatgatcacaccgctgcacttcagcctgggtgacagagcgagaccccaactctaaaaatcaataaagcagggatgaagctgtttgctgctaaatcctgtgtcctacgttaatgagtttctgcagttccccttgtgattccattgaaaattagacccttctgtgtagggaagagagaggccagctgccttcctgggggtcatgctgttctgattgttgacatctgaccctgagcacaatggcagggcatctgtctcaagtgcacagacatcagctagggctggaagagccaatcctccatctactccaggctctggaaacttgaagaccttttctgcttcgtacaaccgtcagctgtcagctggatgaagttcagggggccacagaacttaaccatcctgcttttacagattcctgaaaactggctaaattctgtgcatctgaagtaaattaggaaaggtagaaattgtcactttcatcttgtcattttcgtgttgtttgcttaagacacacgtactggccatcttgtcgttgttgttgttcacagcagtggagttttgggcaatgaagttaaggtttaaattactgaaagcagaaatgcttgtcttccatctgagaacatgaagcatttatttgaggggcgtttgcgggcttaactgttacaatttctcccttactttactcatgtgtccaattttagcctcagtgattgttctagagattctcagaaatagcaggactaatttttttggctcctccctgtttagtgactacgtctcagaaagccttgccttgggctagaaaaaggtagcagatgtgtggccgggcgcggtggctcacgcctgtcatcccagcactttgggaggccgaggcaggcggatcacaaggtcaggagatcgagaccatcctgactaacatggtgaaaccccgtctctactaaaaatacaaaaaattagccgggcgtggtggcaggtgcctgtggtccccgctactcgggaggctgagccaggagaatggcgtgaacccgggaggcagagcttgcagtgagccaagattgtgccactgtactccagcctgggcgacagagcgagactccgtctcaaaaaaaaaaaaaaaatgtagcagacgtgtatgtaaataatgctagtttgaggccaagatttcctaaggagaaatattatgaaccttggtaggaaatatttcctcatatcctttttagatgagaaaaacaatgttttccaagccatagtaattccacattaatatttatgaaaaattaatgtggtctcaactgttttcccacagtccagttccagtgtctcagatccatgatgtaaggagtaattgttgacaccccactgtgtggtaggtctgatccttctggagtgtggattacgtaaatgggggagtaataaatataagaaggtgcctagtattaacaaattagacccttttactctttctggacaagtgggatttgtaactaaaacatctgtgaagtcaagcctttttgcccttgaatgaagagaaaatagctagagtttttgcaacttgattctactttataaaaggattgtgtggcaggtatttatagcatgtgaaatatgtgtgagttcctagctttgaagctctcatgagcatgtacttccagcattagtattctgcattactatgtgcaacaaagcagtgttttggaaactggctcaaatcctctgagagcaacaggcaacagatttgacagttagctacttcagtaccttatagaccatttaacaacatgtactagttttttggtttcctgaataaccctatataatgcttgcaaacatgtctaagtttgcataaggtagtgcatattaaatagtaataacttttagcatttggggttttttttttttttttactcctaatgaaaataatatgctttggtgtggcaccttttaagaaacttttttttaaggctgaggtagaaagatcccttgagcccagaagtccgagattgtagtgagctctgatcatgccactgcactccagcctgggcaacagagcgagactctgtctcaaaaaaaagacaaaaaataataatttttttaagagatggggttttgctgtgtcgcccaggctggtcttgaactcgtgtgttcaagtgatcctcccacctcagccgagtgagtagctgggactacagatgtgtgccgtgcctggcttggtgccacacatctctgaagagagacagggtggtgctttgcagtgcccctgtgagccgcctccatgctggtcaccttctgcattggtcattaagtctagagcagcccaggttctgacactaggttctcctctaattacctaggcaaaatcttttccactttgttaagcatcttttcccatttataaaattaaatgtaccacatctgccagatttgggaaaacaaaaatgttgagacagagaaaccgaacattgtgttatgactgagttcttccacagatcacactcacattcctgacctggtctcacttgggtttctctgctgcgccacggctgcagacccagttctcttctttgtaattgagactcatttgtttccactatcacaaatgcaagtatccttgtaagttttttataaggatataaagcatttgttccttaaacaactaaagtggccgggcgcggtggctcatgcctgtaatcccagcactttgggaggccgaggcgggcggatcacttgaggtcgggagtttgagaccagcctgaccaacatggagaaaccccgtctctaccaaagatacaaaattagccgggcgtggtggcacacgcctgtaatcccagctactcaggagactggggcaggagaatcacttgaacctgggaggcggaggttgcagggagccaagatcgtgccattgcactgcagcctggacaacaagagtgaaactccgtctccgtctcaaaaaaaaaaaaaaaaaaaaattgaagtagaagagtaatgaaataatagaaacttaagtcttctttttaaagaaaatatgtgcacttttctgggttaataaatagcaggcagaggaattccacttcgattgttttattgggagtgggggtttaacataccccactctggtgctgctcagttaagatctcaagcttactttcttttgcacctcaactggagggcttggctttacatacgaccaaatattctgggttggtaaaggcaactccagcaggcaaaatcagagcaatccctggaaaagaggaaaaaactgaaactgatcatttgtggacatttaaatttaccaattgtctagaaattccatacaagagctgagatatatgctcttgttccaactgtgcacttacctttgatacttcattaagtaaattattaatatttggcactgatctaaatatgcatgtcccatctgttttacaactttttaaaaaatttaacttgctgcctgatagttaaccaagtgcattgacagaaatgaggtaagtatgtgacccaagtctgagcttaggtttgaatgcagctttctaatttctaatgctgtgctttactcatgatccacattatttcatcaaaaagcctcacccctctgactcctcaggggttcataatggcacaaaatttaggtcttgccctctactaaagggatggaattaacttttaaaaggggtgatgtttgatgcagggaagagaaagagaacagagagaggggaccactagatgacttactatagtccctccctttctaccgcagaacacagcagagatcagaggccagggctttccctttcatagaactgggaagagacagttgtcagaagctgcatgaggtcttggttttgttttacaaatctgatcttttaatcaagaggttcttattctttagaaacacagtggtccctgggggccactaccctttccctttgaaaacttgaattcgaattctctaagtcaaaagtgaaaggttttgtttgtattctaagaccagcacctatctagtaaccacttcaggaaagcagcaggatttgggagctaggccatgctttaatttacatatcatatgtccttatgtaagagaaagttcatacctttcaaaagaaaaaggaacgtttgcttttttacatctttgttgttcatctgactcatgaaagaacatgatcggttcgagtttatttttaggatatactggtactggcttttagttttagtaaatgttaagttggacaagttaggggcctagcttgggagctgcagaaattggctgagccccacaggtgatttatagataatctttccagtaagaacattgaagggctacacacaatgacacttagaaaaagaagggaaatgaagctgttccttgactactacccagtttctgttgaggtttattacttctagatgataaggtttacacgaagtttacattatgttttttcagttctcaagtttcagcaaatacctgaaccaagtttttttctgttattctaagaactgccctggagtgccttttaacttttgtaccaccacgcaaagtgtactatcaattcatgtcctttagctcttctattcttcaatgcatttctcccattcctgtaggtatggcggggatcaacttttcataccaccaagagtcacccctattccctttgaagtactgccctatggcataagcttgttcatacggtgttcaaacagctaccgttcacttctatgagggtcaccttactggaaaccaaggtatgacgagtaactaaatcttctcatcaagcagaagggagctggactttagaaatggagcctgggccacgcagagtggctcacgcctgtaatcccaggactttgggaggccgaggtgggcagatcgcttgagcccaggagtttgagaccagcctgggcaacatggtgaaaccctgtttctacaaaaaaaatacaaaaaaaaaaaaaaatagccagccatggtggtgtgcgcctgtagtctcagctactcaggaggctaggtgggaggatcacttgaacctgggaagtcaaggctgcagtgggttgtgattgtaccactgcactcctgcctaggcaacagatcaagaccttgtctcaaaaaaaaaaaaaaaaaaaaaagatcaagaccttgtctcaaaaaaaaaaaaaaaaaaagacaggaaggcaggaagacaggaaggaagggagggagggagggagggaaatggagaaatggagcctaggtttgaatcctggctccctcacttactggttgggtaacttacggcaggaattatgacttatctggaaaacagggataatacctgtttcagcaggttgctttgaagattaaaacttacaagtaccttgtaaaacacacataggttctcaacacgttaattgctttccatccaaaaaggttgagagatgagcagttgaccttcactaaccactctaggtggtttatcatctttcccagagaagctccggctatatactaagtatgcctcattcaggataaggatatagctagacccatggtcgtaactttcaaacatcaatttgccgacctttagtcaagcgtatatttaacatttaacgtaaaaaggagacaaaacagaagaacgtgcttcacgttacaggtggtaggaatattttgcctattaaaatgaagaatgtgaatacagagcctaagacttgggtgctcaaatttttatcaattgaatctgtacagccatgcagtctcttggaagaaaaacagactaagaacccactgccgtgtaaccttcaggagttgtgtcaaatgctggattagaaagctgaccctaattcagagtccctacttcttaataggcttcacacttttttttttttccaggcattaagcactgtaacctaagtgggaagaaagagatccacaccttccccaaagaaacagaagatggatctagtgtcaggctcaattagacccaattgtgatgactctccaaaaaggaacaatgcggcttttgtgatatgctcaggcagaaagcttggacattttacaaaacaatcttatcccaagagaaacctgggttccagccctcttcctggaaagaggggttgatccaggaaagttttatactactcttatcagctcttgctgagatcagtattttttttaacaatctcagaaacaacccagaccaatgtgaaaccaggaatatgaaccactcccctgttggagcactcacacccataggtctccacagccaaaccacagggtgtcagattattttgttactgtctaccaaagggaactcttgctggaattctggtatttcattaatctgccccgatttcagtctaaaaacccttgacagagtggatccagcggccagcctcggctattggaagtgctaaaatgcaaatgtgcaaaatcctggccaagctccccatcccccaggaaagtgcttccttacagccgggcctggaggggaatgtgaaaaagagggcttgagctgccctcctcctctccacccggaccctcgctcacactgggagattcagtatgcatgactgagccggcaagcacgcaaggacagcgctcttttaacttttctcaacaatggcttcagtccttccaccttcacatcctccccacacccactctcagggtaaaaaaaatccatctttcttgcccacgtcgtgaaccacttttcaacatcacctctagatctcattttcacccaaagaaaaactggccactcggggaaactgtgacttacatacaaatctggttttttaaaaagtttcattttgttcaatttctttaaatttccacgttgttgaaagtttaaagccaaacattatataaatctccagtctaatcacatttctagaaacaaaacatgtcagtagtaaaccttatacagaataaaattctacccatgagttgactcacccccacataggatgcaccaaactccaccttgcgtcctcttagagtatacaaacaacacctcctaccttggcatgtacccaagcacacaatgccttaaaaataattcgcagatacaaggctgttgttttttttttttttttcaaaaacatacttcatatttcctcttttattatataaatatcagtttaaccttttactgtaagaatataaacgttttaagaggatctttgttattatttatacaaattcacaaacagtacaattaattgataaaggtctctgggtttctttaactccatggtcttgcatgttgctgtggagggttctaaagaaataacaacaaaaatccaacgaaaatatacatcctactcagaagtgatttctttaaagccacaagtcccaacccccaccaaaagaaagaaagtcatctattcctccatttagaaacggaattttttaaaacccacaaactcccattttgttaatagaacagagataagatatgagcttcatcacagccccaggggctctgcaggccagctctgctcctgtttcccacaggaagccgcactgtgtgacctttttggggggaaacttggaagagggtgagggtagggcagaatttgcatatataatcatcattttcaagacacaatctgcatctccaacaaaaacaacggttcaactctcattgctcccacatatttgtgctataaattaagatttagaaataggtcctcaaatcccaatgaacaaggagaaaaaggaaattatagccagaatgtggaagtggggcacactggacggatggaggctgggaagaagccaacacaaaaagacggacaaacccaagggcatctttccagtctaggcacaaacatgtttcagtctcaaaatatctctcttgtagaattccagggcttcagaaaaaaagtaaactaaaacgaggtagccagacatatatatgtatatatatatatatataatttatatatatataatatatagaatatattcagcagaaaaaaggaccatgatttcaaattttttccaaaaaaaaatttttaaacaggaaagaagattaagaacatgaaatgagcatgaatagcagagtactgtaagaggaggagtgatgagaagagactgggattagttacaaagtggaagggtgaaaaggcctttgtagctgggtttgctttttatacatttcaaaataaaaaccagatcacagtattcaaatgaaagctgaagtgaaagcagacattttcctcaactccccagggttgaaaagaccagtcactccccacccccatttccagtcacagcagtggggatacagtagctgaatcagtcctccaccccctgcaggggagtgggtgggtaagcagcagagtccatctctccatccgcggggaaaaggagctgggagtagggtagggtaggaaccccagctgcaaagagaatgggctggaagccgggagggggctggaggagggaggaggaaacgagcctgaggcttctgtcatagccccatctcatccgctgcaatgatctgtgcgtaagtgtgcgtgtgagtgtgtgggggcggtggtaatgggaggatgaacagggcgggacaaggggagctggtgctgccgccctcacctgaccttctcactgtccgtcatctgccagagtcccaggttgagtaccttgaggcacggcagctgcgtgatgcgctccaggccgcgcttggtgattcgggtgcagccgtacaggtctatgccggtgagttggctcaggtgctcagcgatcagctccaggcccttgtccgtgatgcgcacacactgtccaatgttgagcgtgcgcagcccgtgcatctgccgcaccatgcggttgatgccatcatcactgatgtggcaggagcagagggagagagacttgaggccatccagcccctgggctatgtaagccagactctggtctcccaccttgtcacagaacgaaacatccagccccgagaggcgcaggctgcccatggccagatgcatgatgcccgtgtcactgatgttgtcacaggagcgcaggttgaggctgcgcaggctgcccatgtgcgacaggtgcaggaggccagcgtccgagattcccccacagaagctgaggttgaggagcctcaggcccgtcagccctcgggagatgtgctttagagaaagatctgtgagcttctggcagtcctgtagcgtgagctgctccaggcccaggcagccctccgccgcgctgcgcgtcatgccggccaggtgcccgatgcccacatccgaaaggtggcggcagctgcggaggttaaggctcttgaggcgctgcagaccccaggcgatgagcagaaggccagtgttggtgatgttgctgcaacctcccagctccagcacctccaggcccttgaggtactgggctatgcggcccaggctgctgtcagtgatctgcttgcagaggctcaggttgagagcgcgcagggagccgatctcctgcacaaacgcgtggcccagcccgttgtcggtgaggttgtagcagccgctgaggttgaggctctcgatgttggccatgccctggatcacgtagctgaggctgcggcggaggctcaggatctgcacccggcggatgccccgggcctgcaggctggggaacagcgacgggttggcccggcgcaggtgcagcttggcctccaccccccgccacaccgacttgtggtaggcggcgtcccgccaggcggtgcacacctgcgccgcgcgccccttgtcccggacgtccaggtagccgaagatcatggccagcagctccgggaacaggcatgagatgtgggtctccatcttcctcctcccccctccgcggcgctggggggaggaggcgcgggccccgccgctccggcctcgggcaggcgacgagagcgcttctccccagccgccgccgccgccgccgccgccgcctcgggcccaacggccggcccctccccgccttccggctccggccgccgccgccgctcctcctcctggtccgtccgtccttccttcctgccggctgcgcctccggcccggccctcccccgccccgggctccgcacggcgctcacatcccgggcggggaaggcgcctcgctctcgctcccggaggccggccgccgccgccgcctcggctctacccacgccgcgcccgggccgcgccgctccgcccgcgccgccgcgcccacgccccctgccgcatcctccgcctcctgccgccgccgctgctccgcgggccggcgggcggcgagggggccccgggggccgggcgcacgggctccgggcgcggaggaggcttcctgctgcctttgtctctcgcccgcttttcaaacctcccagccccgggccgcccgcactccgccgcccaggcggggggaccaggaggccaatcccggccggcggcgtgcgttccttctcccccgccgtccgcggccacttgggagctgccggcccccgcaccaaggacgccgcggccgtccggccggagcgcggctcggcgcagaccccgggcgagcaggcgggccgtgcgtttggtagcgcccgggccggccccggctccgccgccctgcagcgcgtcccctccgccgctcccgctcccccgcgcccgcgcaatggtacgggcctgcgctgccggaactgtggagccgttgccctggaaaccgagttcggcctggtcccgtggcccctgatttttaaccctgtgggcgccacgggggagcggcagctgtcagcagagcgcctccccacccggcttcttttcacccggtagcccgttattgagccgttccctctctgggccacgccccagccccgttccttctttttctttgctgttgaagtctgcgcagccccttcccacagtttacccctgcaattcgttacccttatttcacacccctctcccttgattatccctgcgagagccgcctcctatagcagtgctcaataatcgtcaccccaactctccttttcttactgtccctaatgccccttaacgcctcattatcacaccccctgctcccccggttggggctgtttactacgacgcctttctctccagtcttgtgtcttaaattggagagaaactcggctgtactcatcttaaacaatgaccccctccagtcggtgttctagaaatttctagaattatccatgactacttccttctagcatcttctgatggtttccagacacgctgtgtgtgtttccctcggtacttgatacatcaaaacttccctctacttctgaacgctgctgcgccaccaatgccctcagtccgctttgcttacaggggaacagccttcccctaagccttgttttaggagctttctccttgtcatcagccttagactatcagttgtatggctcagttgtactgatagtcaatatattcgtatatgctgaatccaatttactttttgattaaaatggaatgacagttgaacttggtttaagacaatccagtcgtgtctgttggtttatcaaccgttttatggaagcagggcacaattccattctaggatgtagcccctgggtcctaaatgtccgtactaaggatagaatttcagaagtttcattttaactacccccaaaccaagaatttttggatcagagaaaatgatcctctgtattttaatttatggatccacacaactagatacaagaccagcggatttatcagaaagggaaaatggtttcattgattctttgaggacctgaacaagatttggaaggggttccatattcagtgtaggagagtaacttttgcccaagcaaccactattagaccaaatacatacagattcagtaataggcataatacaccttttacacccctaccactcctctttcctaaatcaggaaatgcagaagcaaaaattctcgccagcttgttacctcacccacattacacgcagtgtggagcccatagatttttataaccttcttgaaaaaatagactgtactgttagtcatccagtacatccagatgtacggtggcagtaagtgtcacgattctggggtatgcctgggcttcactcttctcctggaggttatctaggcttttattcttctcagtcacttctgcctaaacgtttaccttaaattctgcgcaaaagtcactttttgattgttctgtgcacctagatgtgtttgggttgatgtcaaggccttaatccaaagcaccttagtgtaacttaatcctgcttaataaaaaacaaagtaccccacacatttggggggaattttagacaaggggcctgaccagcctcggactaagaaggagcctaatggttttccttctctagaaaggcccttgttctcaaatctgaagagtcattcagaggtatctggaagcactttctctagaagttggccatctggtcctcgttctaacaacagtttttcttgaattctagaatcttattaacacaaagccttttatttaaggcactcaagtatatattataaggattttcagcaatatgactattttcaccttcaataaataggaaaatatagcatcaagaagcatcacagaaaaagcattcccggggaaaaggaactagggcgtagaatgagccctatgccgaatctgaacacctggtgactttatgctactgaggaaacgactctcctttctgggtctcggtttccttgtgtaacaccaggatgatttgactaggtaatcttcagggacctttccagtaggaacactctgaggccaagagcctagcatactgtctccttaacccatggaacaattacacattgttcctaatgcaggctccagatattaagaataacttcgaatacaataacttcctgggagctttggtttatgctcagacttaggacacaaaaatatatgaagaatatgtatagacaggagactctgattgtctggcaaagatgtataccaatgtagaaaatcctgtggcttgctcttcatatttttaaaactggttgagatttttgtatatgatttaacaagttgcaaccataagttttttaactagcctatttaaaagcagaaatgatagccttgtgtagggagtctctccaaagccttacaaagaattttttttttaattctagatttttcagatggaatgtgcttttcacctgggtagggtgggaaaattgagaggcccaacccaaagatcaggcttacctaaggattcatactttctccttcagaaggggaagacctggcaggaaagatcagaagagctctgtagcttttaactcctcattcaagtatatatatatatatatatatatatatatatatatatatatatatatatatctccaaaaatagtggcccagagtctagtttatgggttgggtcagaggagttaacataggccgggcaaagtggctcatgcctctaatcccagcattttgggaggccgaggcgggatgatcacttgaggccaggagttcgagaccagcctggccaacatggtgaaaccccgtctctactaaaaaaaatacgaaaatattagccgggcatggcagcacatgcctgtaatcccagctactcgggaggctgaggcatgagaatcgcatgaacccaggagacagaggttgcagtgagctggtactgtgccactacactccagcctgggcgacagagcaagagaccttgtcaaaaaaaaaaaaaagttaaaatattttgtgtctattttccttgaactctagtgtatctatggcacaatgcctgctatgtagtagacattttgtcagtgttgttgaactgaagtgaatgagatggataatataaataataatctctttatgaaagacttcatacatatcgaaacttcttcgagagttctgggcagccattagtaatctgaggtttataataaaatgctgcctttccaacttcaaggtttcttgagagtaacattcattctgttgctcagtatttctaagtaggagagcatctctctcgacacttcttcgtgacagaatattaaagataagagagggtgaggatttgattcactgattgcaaataaaagatttaagcagaaacaacaaccaaaaaaagcccaatttaaaaatgggcaaagggtttaaatagacatttctccaaagaagatacacaggtgatccacagcacatgaagagaggctcaacatcattagtcattagggaaatgcaaatggaagccacagtaagataccacctcatatccataaggatagctactattaataaaacagaaaataacaagtataggtgaggatctggagaaagtagaatcctggtgcactgtgggtgagaatgtaaagttgtgggccaggcacagtggctcacacctgtaattccagtgctttgggagactgaagcgggaggattgcttgagcccaggagttcaagatcagcctgggcaacatggcaagaccccatctctcttataaaaaattgtgcagctgctatggaaaacggtatggccatttctcaaaaaattaaaaatagagctaccgtatgattcagcaattctgtttctaggtatgtacctaaaagaattgaaagcaggggttcgaagagctatttgtacatccatgttcatagtaatgatattcgtaataccaaaagttagaagcaacccgaatgtctattgacaaatgaatggataaacaaatcatggtatatactcacaagggaatattattcagccttgaaaaggaaggagattctgacacatagtgagacatggatgaaccttaaggacactgtgctaagttagtaagccagtcacaaaaggagaaatactgtacaattccacttatatgaggtatctagagtagtcagaattatagaaacagaaaaaataatcattgctaggggctggggagagggctgatgcagaatggggagttgtttaatggatatagagtttcagttttacaagatggaaaagttctgaaaattggttgcacaatattgtgaatatacctaacacttctgagctatgcacttaaagatggaccaggcgcggtggctcacgcctgtaatcccagcgctttgggaggctgaggcgggcagatcacctgaggtcaggagttcgagaccaacctgaccaacatggagaaacctcgtctctactgaaaatacaaaattaggcgggcgtggtggctcacacctgtaatcccagcactttgggaggctgaggcaggcagatcccctgaggtcaggagtttgaggccagcctgaccaacatggagaaacctcgtctctactaaaaatacaaaattagccgagtgtggtggcacatgcctgtaatcccagctactcgggaggctgaggcaggagaatcacttaaacccgggaggtggaggttgcggtgagccaagatcgtgccattgcattgcagcctgggcaataagagcaaaacttcgtctaaaaaaaccaaaaccaaacaaacaaaaaaaggttaagatgacaaattttacgttgtgtgtactttacaattaaaaatttaaaaaagattttagcaggacaaacattttgaaataaagatagaaaaaaagagagaaaaataggtgaaaagtattcttacatcaacagattgccgggaaccccctgagatatttgagatgttcccccaaattattagcttgctgtatcttgtaaatgtaggcttaggatcatctttatccactaccgtaaaaataagggcttgtgatctgggtagccagagccttcccgtgagggtgaatgtgtgctatattgtccacactgggaaacccacggaggtgaaagggggtgctgtactattagtattcacgcccgatggatggtcacgcccttttactcttgaaatcgggttgccatttgtaatttgttatttgcagcttttgagtgttaactataataggtgtttttgtagtttcaggcacccaaccaaagaatcagaaatacggtaatagaataatctcagatatcaggtattgtttgttcaatgttgacaaacaccttaggtacttgttacaaaacaggtagatagaacaactctaggaaaataaagtgtgttgtaaatgtagccatttccaggtcaccgaacacttagaaagacgggttttcaatttattcaatcattcaggctgggcagggtggctgtaatcccagcactctgggaggccagggtgggaggattgcttgatcccaagagtttgagaccagcctaggcaacatagcaaggtcccatctctacaagaaataaaaataaaaataattagccaggcgtgatggcatgcacctgtagtcccagctagtcaggaggctgaggcaagcgggaagaccgctgggccaggaggtcaaggctgcagtgaactgtgcttgcccccctgcactccagcttgggtgacagagccagaccatctctcgagaaaaaaaattcaggaaaatattaatacaaattatatacattgctctgtgctatgaaataaacaaagatgtagaagattacgtttttgcctttaagaacttgggatccagcaggtgagctagaaaatacctgtgacagtgacagtatttgttagtgttataagtgccagcagagtgatagaaataaagttctcagtttggaggatccatagtgaaacctagaatttgaataggtgttgatgggaagaatgtcattacattatagtggaaatttttttagagaataggctgaagttttatattgtttagaaaaaaataagaacattacaatagcaaccatgtattgtcatacattgttatggatcttccatattgaggcatcagttaatctaaaaaatctaaaaaatcactttcctaaagaattcttggcttttatttttcccaagaataagagatctggctgggcacggtggatcattcctgtaatcccagcatttggggaggctgaggtgggaggatcacttgagcccaagagttcgagatcagcctgggcaacacagggagaccctatccctacaaaattaaatttaaaaaattagccagacacagtggtgcgcacctgtagtcccagctattcacgaggctgaggtaggaggatagtttgagcccaggaggtcgaggctgcagtgagccgtgatcacaccagtgcactccagcctgggtaacagagagagagaggagagagagaaaaaagagaaacctttaactcttatgtatctggaattggaaattcagtatctgaagtcagaaaattttaattcatggtctggactttgcaactgtttttacaaccgagattgcctcaaaaaaaaaatttgttttagtcagctctctcctcatttgccccattcttctctctaacaatagaaccagacaaggatggaaaaagagggaagttcagggtgtcctgcctgtggcgtccacgtgtgactctcccctacgtgcccgtgctttctgttcccattcccgtgagctgcgttcacaccatacttggagtctgaagctgtgtgtttgaatccttgccctcccactgtagtctgttgcctgacctatggcaaagtcactcaattctttgagcttcaatttcctcatctataaaacgaaagtgattgtcgttcacggagctgtggtgagatgcgttaagaaaacatccacgagaaaggaagggcctagtgcatgcccggcacatagtagggacctagtaaatgctgtttttgtttttttcttgtataaagatgcactttgaaaaagaaaaaaaaaaacccttacagatgtgcctcagaattatacagatgtacatttactgacagtgacacttttttaaaactgtacttcctgttttaaagaaatgtgcaggttcgaagctgggcgcagtggctcatgcctgtaatcccagcactttggcaggtcgaggcaggcgaatcacaaggtcaggaattcgagaccagcctggctaacttggtgaaaccccgtctctactaaaaatacaaaaaattagccaggcgtagtggtgggtgcctgtaatctcagctactcgggaggctgaggcaggagaatagcttgaacctgggatgtggaggttgcagtgagcgagatcactccactgcactccagcctgggtgacagagcgagactctgtctcaaaaagaaaaagaaatgtacaggttcaaggactggaaacataacaaaagcgtaggcgcataagagaatgatctttcaggtagagccagccatgtgtttgcatcttatcttctcctctgtaagtcaggaagggtagcatgttccattcatgcgcaaagaaatagtccagaactcctcttctgccagacatccatccgtcctgtggccttggacctatggtttcactaccaactcttactctttcttttttctgagacagagtcttaccttgtcgcccaggctggagtgcagtggcgtgatctcggctcacggcaacctcctcctcccgggttcaagcgattctcctgcctcagcctcccgagtagctgggattacaggcacctgccaccacgcctggctgacttttgtattattagtagagatggggtttcactatgttggccgggctggtcttgaactcctgacctcaggtgacccacccgtctcagcctcccaaagtgctgggattataggcgtgagtcattacgcctggcccaactgttactctttcttttgcttagcgtggtgattctgaagcttgactaggcatcagaataaacttgagggcttcctgatgcaggacatctggggagaggcctgagaatttgcgtttctcacattgctgtcagcatcacctgggaactggggatcacagaactgagaatcgctggtagaacctcctagtacccaccttttttttccttctttaaaacttttgttaaattatacttcttaaaagctctctcttttttggcaaaattaaaatcctgtaggacaaaactatagtcccccgcccccctccatcttctgtcgtttagatcatgagctcctctgatacaaaggttgaaattttctccagtggtatggtggaaagaacttaggttttacagtcagatgaattctaggataaaatcttgactctgtcacttattagctctatgactttggacaaattatttaaccactaagaggctccattatctcatctatgaaatggaactagtgatttccaaatcttgggagttttgtgagggttgactggggtaatgtgtgtaacctcctagtatggtgacagaccgtaatgaaaacagcctaatgtttacagagcattgattgagcagtaggccttcttttaaggtctttacatttatgaacttccctaattgtgacaacagctcattttacagcctatgaagagggttcattactatctccattttacagatgaagaaagtacagcccagagaagggactggctcaagaccaaacagctggccgaactggaatttgaattctgtgatctggatctagagcccatatcccagccaccatgctttgctgtgttaacagtataagtttagcagtccgccttgctaggatgcagttactctatgatgccacgtaaagagaggtccatgacacagacagataaatgccacatgttctcactcatgtgtgggagctaaaaacaactgagctcatagaaacagaagtaggggtgaggcactgtggctcacgtctgtaatcccagcactttgggaagccaaggcgggtggatcacttgaggtcaggagttcgagaccagcctgggcaacatgtggagacccccatctctacaaaaatacaaaaattagcctggcattgtggtgcgcaccagggatcccagctactctggaggctaagatgggaggattgcttgagcccaggaggtcgaggctgcagtgaggtatgatcacaccactgcactctagcctgggtaacagagggagaccctgtctgaaagaaggaggctgggaagtgcagcagggaggggagggcaggagtaggttggttaatggatgtaaaattacaactagacaggaggaataagttctagtgttctaaagcaccgtagggcgaatatagttaacaatttattttatttgttcaaaaagctagaagagaggattttcagtgttcccaacacaaagaaatggttttcgaggtgatggatatgctgattaccctgattggatccattacacatagcatacatggatagaaatagcactctgtgctctataaatgtgtacaatttttacatgtcaactgaaaataaaaggaaaaaaagatgtgcaaatatgttttgagatctttaaagcgccatgtaaatgtgtggtatgttttgcttgttaggagtactgctgtcccattatgtatttgaacaactcctcataaagtacctttggcttggggaaaaaaaagagttaacagtgagtgtcatattgaccatactgtgagcaggatctggtcacggtgaggcatggtgatcatggaagacactcgaaggctctggttggtttgctagccaaaataggtcagagtgtgtgtgtgggggggggtgagagtgtgtgtgtgtgtgtgtgagagtgtgtggggtgtgtgtgggggggtgagtgtgtgtgagacagtgtgtgaggggtgtgtgagtgtgtagggtgagtgtgtgagagagtgtgtgagagtgtgtgagagtgtgtgggggtgtgtgagagtgtgtgtgggtgtttgtggggggtgtgagagtgtgtggggggtgagtgtgtgtgagtgtgtgaggggtgtgtgtagggtgagtgtgtgatagtgtgagagtgtgtgggggtgtgtgagagtgtgtggggtgagtgtgtgggaggtgagagtgtgtgagagagtgtagggtgagtgtgtgtgagagtgagtgtgagagtgtgtggggtgagtgtgtgtgagtgtgtgggggtgagagagtgtgtgtgagagtgtgtgtgtgagtgtgtgagaaagtgtgtgtgtgagagtgtgtgggggagggtgtgtgtgtgtgagagtgagtgtatgtgagagacagagggtggtgtgtgtttgtgcctgtgtgagtgtgtgtactgcagggtagatatcctgatacctgtttcatgccttcaggcccacagctggctgtggcctcgcaggaccaggaatgcgtttgtgtgtaattatgtcaccctctagcggtgacttccctactagccctttatccttgaaaagcccactcgggtgtcggtgacctctcttcccagtgacagcccgggagcagaacttcggggagattctggcatggagggacagtgctgggaaaagcggggtgtggccgggcatgaagagagtgccagggcccgggaagagtgaaaagtacaactaggactaatgaggagtgcaccctgccgagcagaaggggaagcaggagcgggccaggcacagcgtctggagaggagggaagagaaggcgctctcaaggggaggctcttgcgtgtcaatttctgccaagtgccattttatgtctgtggggtgggacggttatcgcagctagagctctttccagaatgtcagcactgagggccgaagtgggcgtggagaagcagtttcaattctgttttccaagggaagtaggcacaggtttagaggctgcctggagctgcctaaattccaaacgttcaccaccgtggagtggactgctgacttggctgcttctgcctagcctggggctctgttccctctgccagtaaaggtcattttatcaggatcctcagaggctttcgcatgttgataaatatttcaaaagacaagggggaatcaagatcagtcttactgagagcggatttggaactccgcgttcggcgggacgctgccgcccgaggcctgactgagccacagtgcgaagggtgctccctttttgaaaaggtgctggcgccaggccaggctttgctggaaagtcctatctggatgagtcagagcatttacatttcttacataatgtcagacccagaggagctttagggatcagcccagctacagagttcacagccaggtccccttttctgccaagaggatagggttaaaggttttaaaaaaaacaagcagagtctcaaggggcagaaaagcgaaggctcagagttaatgctgattaactcttcacaccccagaaaagatggttctgaggtaaaaccacacctttatgtcacatgatgccactgccttcctgaatccagtcattcctaaagaggtcagtaacaccaagcactgaccttcccgccttgtgtgcaggaaattaaagaggcatgaaaaccctgtccacattttctctaaagttggaacagcttgcctggggcttcagactgagcttcaatctcaagcttcagtgagattctttgttgtttattttttatttttaaactatttggccaggcgcggtggctcacgcctgtaatcccagcactttgggaggccgaggtaggcagatcacttgaggtcaggagtttgagatcagcctggccaacatggtgaaacctcatctctactaaaaatacaaaaattagccagtgtgatggtgtacgcctgtaatcccacctgctcaggaggctgaagcaggagaatcgcatgaacctgggagacggaggttgcagtcagctgagatcgagcaactgcactccagcctgggcgacagagcaagactccgtctcaaaataaacaaacaaactaactaactaactaactaacttactattgaaggccaaagagttcaagtaactaacataagaaatcagtggctactgttgtaaccatcaagaattctttaatgggccaggtgcagtggctcaggcctgtaatcccaacactttgggaggccaaggcaggtggattacgaggtcaggagttcgggatcagcctggccaacatggtgaaaccctgtctctactaaaaatacaaaaattagctgggtctggtggagcacacctgtaatcctagctactcaggaggctgaggcagaattgcttgaactggggaggcggaggttgcagtgaactgagatcacgcaactgcactccagcctgggtgacagagcaagactctgtctcagaaaaaaaaagaaagaaagaaaaaaaaaagaattccttaatttccttaatttaactggttcagggaacctaaatgagagttgtcacataatagcaaatcttagtgaccagatgacactcaaagcaggtgtaaatatttaacaaaagcactgtgtagacatttaatgacaatggttgctttttgtttgcttgctttttatttgtttacaaatgaaaataaagcagagaatgagaagtcactttctcagggtcacgggaacaattcaggttgaacgcatctctcctccgacatgccgagcgtctttgagtctcctcacccaggcgcacactcaggattgcagtcatctgctattgttgcctttatttattttgagacggagtctcgctcttgtcacccaggctggagtgcagtgatgcgatctcggctcactgcaacctccgcctcccgggttcaagggattctcctgcctcagcctcccgaatagctgggactacaggcatgtaccaccacgctcagctaatttttttttttttgtatttttagtagagacggggtttcaccatgttggccaggctggtcttgaactcctgagttcaggtgatccacccgtctcggcctcccaaagtgctgggattacaggtaggagccactgcacctggcctattgttgcctttttacttgatatttcaataaatttgtgagcaattggaatggtaagaaattcgctgcagtacataaaagtttgatcacttagactgctgtgtgattagggttgctcagtgatcttccggcaataaagggaggaaaaggagaaatttcagatggagtgatgatggatgtcctcaggcatgtcaatggctgctgaagtgctatgggaaaatggaaaacacaatctttgggatccctctttcagccattttcctgcttttatatctataaactttaaaaagtagggcatactttaaacaatagtatactaagaaattgtcaccgctggcagagccaaaattgaatcagcttgccttgtgattacatcagaaatgtgtcttagtctgtaaagcttcactacaggaaatgcccaggagctgctaataaagtttaatacacatttgcttccttaatgctatattaacatcctgaccatcacaactttcattgtaaacctattgcttattaaaaacaccctgtaagatgtcacaaactgacagaaagttggggctactacatgaattaatatgctaactagtatttttcagtgttatatagtataagatagtaagtgcttgaaatatgagcattttgaaatccttggccagcataatcccatgggtaacactgaattatccatggctgtgggagagagcaggtggttcacttccaaccatgggttgtgttccaaactaagggtttttgtttgttttgttttctttcttttaaagaaaatcaagtttatttttgaaactgttcattttaattctaagacaaagctagaaaaagaagaatggaagatctggaaaaaaagcattgtcaactgtcactgtcctaccatgggaaagaaatgtcttacaaacggaaaaaaaagttggagagaacgagaagtttctggtgttatgtaagaggaagcgcccagattacatataaaagtcaactgcttcacgccctgttactaaatattagggatgcaaaatacgtggtggcagtaagtcagagcctggtttcctaaatatttcttacatgttagggatcctgagagatccctaaacaagtagaaaattcttttttttttctttttgagacagggtctcactctgttgcctaggctgaagtgcaatggcataatcatggctcactgcagcctcaacctcctgggatcctgggctcctgggctcctggggtgatcctcccacctcagcctcccgagaagttccactacagccagccaccacgcctggctaattttgcatttttagtagagacggggtttctccatgttggtcaggctggtctcgaactcctgacctcaagtgagccacccgcctcgtcctcccaaagtgctgggattacaggtgtgagacactgcgcccggccaacaagtggaaaatactatcctgaatgagtgtgtgtgtgcctgctgggagaatatttcctagtgtttcctagatccttgttagttgacttcccacccacaaagccccagaaggagtaaactgtctctaaatatcagaataaacaacaacaataaaacaacttttatattttcatttctttttctttttgttttgttttgttttgttttgttttgttttttgagacagggtctcactctgttgctcaggctggagtgcagtggtgtaatcatggctcactgcagccttgaactgctggtctcaagcaattctcctgccccagcctaccaagcagctgggactacaggcatgcgccaccacacccagctaattttaaaattttttgtagagacagggtgtccctatattgcccaggctggtctctaactcctggtctcaagtgatccacctgcctcagcctcccaaaatgctgggatttccggcgtggacctcactgcccagctaaaacaacttttaaaaggtatattagagatccaactagattctactcttgcatttatctgcagcatatcagtttggtttgcccatggttaggtggttcttggtctgggtcttagtttcatgcgtctatgcatatgtggaaactcatcaagctgtacatttaagacttgtgcgttttaactctgtgtgttttgtttcaattttaaaaagtttttatttatttattttttaagtcagaaggggtttaatgggtcaagaaaagtttacttctgtgcacacaaattatctcaaggtctgtttgttcaaacagggtaaccaaacagggaccgattctacagtggctgctgcccggagttttacacagatgggagcatggccgtacccctgaaccctccaaccttctcttgcctgtgattaccactccttccctggccttttctggcctggctgctttcactgctgaagtagggcaaggattttgtttctcttcattacccttcaccttgccaggcctctgttcatcccatccctcggcccctagtacaaagtatgcagttagcactccataaatattgactttaattttgattatttttctctggttaatatgtgttgggggccgggtgcggtggctcatgcctgtaatctcaaaactttgggaggccaaggtgagaagatcacttgagcccagcagttcaaaaccagcttgggcaatacagtgagatctagtctctttttttttttcaaaataattaaaaataaatatgtgttggggtgggcagtgagtgcgggaaagaagggggaaagggagattgtttctaatgtacagacggggagacgtctggggctgcgtaggagctggggtgaagagcacaaggcattctggttttgcctctgtatttgataatgttttcttaatgttggaaaaatgcaatagttttatcatttgccacataccttcccatgctgttccctactgaaccaaatcaggtcatattatactggctatgttatactgcgctgttttccattgactttttggttattgatattggcttttagtgttgggtgtgtggtttcttttcacacaaacatgaatacgttgtaccactgagattttcctaggggttcagtcattttgagttggagatggtcattgggatgcatttttacattcctgttctcactttctttttttttttttttttttgagacggagtctcgctctgtcacccaggctggagtgtagcggcctgatctcggctcactgcaagctccgcctcccgggttcatgccattctcctgcctcagcctcccgagtagctgggactacaggcgcccgccaccatgcccagctaattttttgtatttttagtagagatggggtttcattgtgttagccaggatgaccttgatctcctgaccttgtgatccgcctgcctcagcctcccaaagtgctgggattacaggcatgagccaccatgcccggctcctgttctcactttcatctgtgggtgccacccagagcataggctttctatggaacagtgaatgtgcttacatatgagtagaagaagcgaggtttttcttatgcagcccgggagacaaggaaaccgctgtgatgccgtgtgccaatagcatgcatttatttgtggtatatcagagcctcagatccagccatcccagacagtcacgtccacaaggatgagacccttttgcaggagacagagaacacacctcccttattcctgctccagcagttgagatctgctggagacccttactcatgtttcctggacttgaactttaggacactggccactgggcattttttgcagagggtactcattagaatttctctttctgtcagttttttagcctattttttaagctaaatttctaaatgcttttgaaaccaacggtgttgttttattttgctgatagaacccagatgcgaggagggagttgtttttttttttttccttccatcatttgaatcattgcacaagcaccgtatcacctagaaacagagggtgatttcaggacagtgctgtggccacaaagcatggttaggtttggaaaagcagcagggaaaaaaaaatgccttctgattcaacacttccgttctatgtgatttaagcacatatctagttacaaggtttctttggcaaaaacaattttttgctctggagttagccaggcaaagccagcgtccccctggccagttgagtttgaggaccatctgcctcacacatcattagcagcattgtttgtttagggcccttctgtagaatctttattcatggagaagtagaagaaaactcaaacagctcagctggatttccaggtcctgcgtggaatttgtaacccctttgacttctcaactgagaaaattggatgcggctgtcacagaaagagaataaatacggaaccccacaatgctatgcttgcagccacttttattccattgaatttcacacataatgaaaggcaggcatactctgagaggcacggagctgaaccagtgctgggagtcctgcaattccaagtaggttgagctggtgataattctgggcaaaatactttagtcctctttagttggccgctggctaaagcatgcgggcagtgatacggctcctgttatcctactgcgagtgttctgcttttagaactaagaaaacggtgaaagaggaaagacaagtgattagttaacacctaaaagatgtatgccctcacgaataatcaaagaaaggcagtttaaaatttgatagcattttttccctattgtgagaaagaattttttaaaatgataatatccaaacatcttaattagcttttgtcatttaaagctaaaacccagtttagtgttttattagacttgactttcatgaaaggttgggaattctaaaaataacttattttgaaagagtaatgaatggcccaacaaacttaatggtccagttcaagctattggttgactggtcaatagatgctagagaagttaggactggaaaagacgttagggcttatgtggctctgccctgtcattttctaactgagaaggctgggacctagagacgttgtgtgacttgtctagggtcacacagttgtacggaggctggaattgcattagtaaaacatgatgagttgttatttagatcttgctctcagcaaatagcttcatataggattaaactttttgttttcaatacctcaaggatgttgagcttccctgtctttccagacagacaggatgtccgagacctcaaatcaggcactgttgcctcatttattctttgtccttagatgaacgagtggctggatacctctacatctttagaaaaaaattttttgagatacagtcttactctgccacccaggctggagtgcagctgcatgatcgtggctcactgcaacctccaactcctgggccaagcgatcctcccacctcagcctcctgagtagctgggactgcaggtgtgcatcaccatgcccagctaatgtttttatttttgtagagataggggtctcactgtgttccccaggctggtctggaactcctgggctcaagtgatcctcccacctcagcctcccaaactgctgggattgcaggcgtgagccaccacatccggcctagatctgtttaatggggataataatcctggcacaattgatgtccctttgataatcttgaaaccccttgagcaactacaaataaaaataaggcatgtacagtctaaaagggggataaacgtatataggtaagtctaatacaaaacagaataagtgttgtaagaggttgtattagttaaggtcttgaggttcctgtaacaaacaaatctcccaaatgtaaattggctctagaatcatagaaatttatttctagcccatgtaaaagccaaaatagatgttcattattatcaggcaggtctccctctggtaattttggggcttgggcttcttctgatttatcactctacctttggcctggttttgaaggccaccatgcttgtctgcatcaagctgaaagaagaaaagcgagcttggaggtctcctggttggagatttttagaggccaggcctgggagctgcagacatcacttcttctagtatacctttagatagcacccagtcatatgaccacctctttgtgcagtggatgctgggtaatgtagtccagcggtgtgcaattttagtgaccatcaagtgatctctgctacaatgggctttgagggcccaaaggaggaggacgtcatatgagagtgaagtaacttattggacaaatacacacatgcctaggagggtggaaataattaataattatttctactattaaccgtgattttgtcttaattttaataagagggttatatatctcttacatattacagataatcttcaggaatcttaggaattcctaaatttatcctaatatttaggaattcctaaattcctgaaaataaggtgggatatgtatctcaatttgtttgtattttcaggagtggtgactctttctgatccatggcctgtgcttacaagatagccggatcccatggagatcacacctgctccagctgtctcatgcagcttgggaggtgaccacagaaacagtgggccctccccaaagccacatgcggatagactatagtcaggactcttcatctccattcagcagtgaccagaggccagcggcccgaggcctgtgctggtggtttgttccagctgcggacatttgtcatcccttggctgcataaggcacagaccacacctcctcgtctcctttccactcaggctgacagtgctctccttctgccccttgtagtgtttctactgaatcagacctcccagctgggctcccaccttccagatgcttaccctccacactccatccatcattattggagcaaacgattaccagagcttttctaaatccacatctgatggtgcctctcccctgttcagatgcctcggatgtctcctgcagatgacaagagacgcccaaactccttataagggggccccaataggaaggttctgcttcacgaagaattaatgacttttgtttgtctttagattttggctttggttctctctctctctctctctgtctctctttctctcccccttccctcttctgttttctgaagttgaattttggacttgaaactacgtgtcatgtgtttttcaggcctctgtgcctttgctccttgggcgggtctcattctcctatctccagctgtgagaatcctgtgtgtcctcttagggacaggttcaaataccatcacccccagaaagcatccccaccgttggaacgacatagtctttctcagctgtttggatagtaattgatacctccattataacgtattgccctgctaaatgttataatcacatatgtttgcctcacctctacgagattcctgttattcaaccaagagttcctgttactcaactttgagtaagacctaatagatgctcaataatattagttgacttgaattaagagtcacagaaagaattccatttcgattactttttggcattttcactgggtctgaactttttcgtttactctgagtagcaaatttaaaatagcaaacaatttggttctgatcatgggaaattgctctcaaggtcattgcagaatggctgcttttcctaaagattacctgcaatgatggaagtataggttgtcattggaatagaaaatggttgtctccatggctggtaggtggggtcttgctcctgggcggtaggttagagtttgctacccttaccttgagtgccatggtactttgcaagtaactctgttaaagctcctactgcaccacgtttaaacaatggatttcaaatggaactttcggttttgtacaagtgatgatttgtgttcttgcctggcttccactctagaccagcactatgagacagtccataagctctctgtgatcatggaaacgttctataatccgtgctgtccaaaacaatagccactagccacttgtagctactgagcccttgaaacgtggcttctgcaatggaggaactgaacatttaatttaaattcatttttaatttaaatagccacatgtggtcagtggctaccatcttgggcagtgatattgagttcctaggagagtagcattgtattaattgattggaatatcctatacagtactgtgtattgagtaaacctacagtaagcatgtgttaaatgatgaacagttaacatttattgagtgcctgctgaatgctaggtgcttcccagaggctgtccttgtgttaccttcattttctgcagagccccgtgctggggcagcatagacagcaagcttgacccccatcattgcagccttcaccaagaaaacaggcagtcgagggagcaatttagcaagagggtcaggagttccgtgaaaagaagcctggcagagccataaaagaaactaaagaattttggtggtgaaccaaaagcctctgtaacctgcccaggcctgaatttggtgatcatgcttttgcctgaggcagccacagaggttatttaattctcaaaactagggcctgtgagacccacaaacctggtctgaggtttgctagcagggactctagttttggcaaagggaatgtgaactgcttagcattggagggggagacaggagagctgaccaccttggctctgaatgttctcatcggtgaggaaggaactggtgctgtgcctgagtgggcgtgaacttgttttgcctgtggttttctttagaaagctgcttggttcctcttctctcaaaggatttggaaggtcttccccgcacaatcaaaggagcagtttgagacacaggggcgacagctggggacagcattagagggacccacattacttagagctactggtttccccccagataaaaacccaggtgtcgtttctgcatgagcagtgagtgacgaggagaattcgcttgcagcctctccgctacgctctgcctttagagtccctctagccgtggtccctgtgttgccgcttgcccctgggtacctgactgatgaagacaggctctggggctcgccgttgaaggtgctgtggacccaggggtgctgtccttccgctgttccattcattgcaacattcatctcctgcctgtttacaaaaatgaagcaattatcctattcttccaaatggaaactgctaatttttgaagcagaaggttgacagcttcagtaagatctcaagagagcgagaagactggaatcaggtgaggccataacttcttatctaaacttagtttctggggtggaattacagaattgcttagaaaaagagtcaatataactacttgcagaaaataccacctgtaaaaatccagatttataaatggtgactatgcatttagtacaatgattatcatatatgtaatatataaaatatatatataatatgtatattgaggtccctttaaagaacagcatgatgggctggctcatgcctataatcctagcagtttgggaggctgaggcaggtggattgcttgagcccaggagttcaagactagtctgggcaacatggtgaaactctacaaaaaaatacaaaaattagctgggcattgtggcatgtgcctgtagtctcagctactcaggatgctgaggtaggaggatcacctgaccacagagagatcagagctgcagtgagccatgatcacaccactgcagtccagcctgagcaacacagtgagaccctatctcaaaaaaaagaaaagaaaaagaaaaaagaactgcatggcaaatttgaaagtcttttggaacatgacttgtgaatgctccaaacattccaaaatgaatgagtgaagtagccaggagaaagacagcagagagcagtggggatttgggaaagttagagaacctgtgtgccacccaccaagacattcatattccaaagatttgtaaacattgtgttagtcaaagacacttgggctgggcgcagtggctcatgcttgtaatcgcagcactttgggaagcctaggagggaggattgcttgaggccgggagttcaagaccagcctggacaatatagggagacccccatctccacaaaagaatttaaaaacttaaccagacacagtggcttacacctgtagtcccagctactcaggaggctgaggtgggaggatcgcttgagcccaggagttcgaggctgcagtgagctgtgatcatgccaccgtactccagcctgggtgacagtgagacgatgtctccaaaaaagaaaagacagctagctgactgccagttggtgatcctggttttaaaagttgcatggtttccccaggtcctttaaaaatacgctccattttgcaaacacagtagtacctctacttggtagcacaagacacatttttattctaattagcgcatggcatagagagaggttatccacctgcccttggtggtgatccagaagtccatttatttacttcattcactctaagtagacaggaatttgcagaaaacagtagcaattgcacaaataaatgtttttcccctatagtacaataccccagaactctagatctggtgaaaatagattacttgcaggacaagagcatctaaacacccctcaatcctccagcccttgaaaacaaagtccatagccttgttctcttgaaacaattcctaaaccacactgacctgtgacctatacacttctgccttcttttctagagcatattttaaaactattttattagtattcaggagaagggaacttcctctttcttatcatctgcacagaataagacttccagtggacttttgcttgatacctggggagaaaattgtgcttttccaagtaagatgagtcatctgagatctgccatttctgggaattgtacagggacccagagtcttagggatctgctctgcctactttgtggaatttattctcacagtgcatgagttggtcactttcacactgctccaggcaccaggagttggaagctggaagctctattctctggaacatcaggcattagattttagtgtgaaggcctcaggaattgtttctgcgctcctgccaccctgcactgtgattgggtctgttttgctatatacttcccaaattgtgtaccttatcactgggaatggcacacacatttctggggaagggtagtttagcatttttcttaagggccagaatttaaatctcatcactcctaccaagcccccagcccctcccaccaagcccccagcccctccccacccctaagacatttcttctcctgcaagccagagaaacaatgagaaaagacacagaatatttgggagatgaggcttcccaaaggactgctgcaatcatggtggagctgatacaaccctctccccgcccaattttttattttcatttctaccaactgtagattatgcatacacacaagcagatcacacaaaagaatactatgcctcagggctaggaggattcattgagcaaagcttggaaggaagaactagagagaaacctagagacagagaccctcgggagaaataattaaggctggcagggaaaggctgtgttaattgagctgagaagaaagatgagcatccggggattctcgtaagaggtggtggaatttgcagataaagtcattggtacattattggattcatctttggttactactttttaaaaatgttttttggggaagaatgctatctagaaaaaaattcatgcaagagaaacagatagctacagaactaaatagtaataactgaccaaaaaaaaaagtgagacagagggtgattttgccatatcctcatttcctggactgagcaagagaggaagcgaaatgctgagtcggctcctggcgtagcggctgccattcatgtgccgttgatccaggcctggcactgcgagagcaatacccattggtttgcacagaactccctcccaccagccccacctgccctcaaatagtcatcccacgtggttgtctctacctaaatttcccaacatgtttctttttgagtatgaggatcttcttttttaagtcaaaaaataaaaataaaaaaggtcacatgccccatgagaccataattgtactttccgccaagaaaatataatatataaagaccttcaagccattaggtattaatatgacttttttatttttaaatatttttgttgtctaatataatgcagaaaattgcatacagcataatacatgcacaacttaataaactgctgtagtgtgaactgccacatatccatcaccaggttggaaaatagaacattgctggtatcccaggaacttcctcgagccccttcctcatcacagccccctcccttggaaaccactccctgatgtcatcatttccttgcttgcttttctttatggcttaaccaccaatgtgtgggtccccaaacaagatagttttgctatgaatggaaccatagttcatatactttcttgtgacttgcttcttctcaatattatgttcagaagatccatgcatgtggttgcatgtaacttgtagtttgttttccttcctgcataataattctttgttgtaatatatcacagttaattgttttgtccattctattgttgatggatattgttgcttctggtctgaggctatcaagagtgctgctattcttttgttgttgttttttttttttgacatggagtctcagtttgtcacacaggctggagtgcaatggcgcgaccttggcttactgcaacctccgcctcttgggttcaagtgattctcctgcctcaggctcccaagtagctgggactacaggcacccgccaccacacccagcaaattttttttttttttttttagacggagtctcgctctgtggccaggctggggtgcaatggcacgaccttggctcactgcaacctccacctcccgggttcaagcgattctcctgcctcagcctcccaagtagctgggactacaggcatgcgccaccacccctggctaatttttctattattggtagagacaggtttcaccatgttggccaggatagtcttgatctcttgacctcgtaatctgcccgcctcagcctcccaaagtgctggcattacaggtgtgagccaccgcgccccaccctgttattttgaaagttagagaactgccatggggaaattcatttatcctttcaagagataagaatgggacataagatattgcaatttgttagagaaaaagaggtcaattagcaggctcttgtagtagctcatagtatgacaataggaatgttgagtagggaatatattcaaaaaacactatagagatacaatcaagagaccttggcaattgatttgacgtggaaggcaaagaagagggaggagtcacaaaggataccaagatttcaggcctggatacaggaagagaattggaagacagagaacacgcatgattgatatgaaggtgtgtaatcaatcagcattttaacttctatatttggctctctaggaagattcactcaacccacattttatgatcaaaaggacagtatccagggtgactggtcccctatgtctttgaccccattcctgcagtgttgcccccagaaactggaagcatgtcatgatgggagttttcctgggtaattgatgctgaattatcaatgggaataccaaatcagattttttaaaaagttaatttaacatttattatttttagagacctctgtcatccaggctggagtgcagtggtacaatcatagctcactgcagccttgacctcctgtgatcctcccgcttcagcctcctaagtagctaggattacagacatgtgccaccatatccagctatttttttttttttttttggtagagatgaggcctcactatgtcggccaggctggtctcaaactcctggcctcgagtgatcctcccatcccggcctcccaaagtgctgggattacagatgtgagccaccatgcctggccccatattagattttggagggactacataaatttcacgaacaagcaattctgaaaacagtggaaattattgaagtcctccttcattgcactatctctcctcttcttcgaaaagcaccttgaaattttctctttgaccaaaccacatcttcatgtgaaatcctttctgctgttttcctcctgttaaaagccctcatattcttcaaggccctactcaaatcccacatcctgagtacagctgctcccttaggctcttctgacacttctttttttttttttttttttttgagacggagtctcgctctgtcgcccaggctggagtgcagtggcgtgatctcggctcactgcaagctccgcttcccgggttcacgccattctcctgcttcagcctcctgagtcgctgggactacaggcgcccgccaccacgcccggctaattttttgtatttttagtagatgacacttcttatagtgtacttttctgggcaggttttctgttttccccagctagaccaatgcaccttggggcactccccaaggtcttacacatttttacattatcttattaagcagtgccagcctttactcttagaagctgaatgttacttatgtctttgaggaaaagacagagagttatgtctgggaccaggaatctccaaaatctcaattagcagtggattctcagataaggggaggtacagtcaagcagcttcctcacagcaaatggaccaagttgtatggaagtcgaagggactctccttgtcttcatgagaggctggccttcgtggcctgcttcctctttccctgagagccagaggagggcttttcttttctttcagtcaacaaatatttttctagcaactcccacatacccctgtgtactatcctatccactggggagaaaatggtaaataagaccgtttccagagcatatgagggacagaaacaaaagcacaacagatgagcatgccacactattccatgtcacattaaatgctgtggctaaaacatgtgagaagctagaaatagaatgatgctgctgggggccttctttggcagagatggttagagaaggcctcttggaaggtgtggcctcaatgacaaaggagcttgctctgcacagagagaggagaaaccattcccagaagtcggcaaggcacagcggggagaaacaggatgggtttgggtaaggaggtatcaggagtttggggttctaaagcacagcatgaaatcctaaagaggatggaaaggttggcggggccagattctggaaggcgtcatgtaatggggtgaggagttatgactcatcctttaggagataggaaacctttgaagggttttttgttgttttttttttttttttttttttttttgagacggagtctcgctctttagcccaggccggactgcagtggcacagtctcggctcactacaagctccgtctcccaggttcacaccattctcctgcctcagcctcccgagtagctgggactacaggcgcccaccaccacacccagctaattttttgtatttttagtagagatgaggtttcaccgtgttagccaggatggtctccatctcctgacctcgtgatccgcccgcctcggcctcccaaagtgctgggattacaggcttgagccaccgcgcccggcctctttgaagggttttaagcaaagaagtcacatggtcaaatctaagctttgaacagagctcctcgatcgctatatctactgaaaggcaagacagttttgtgctatcgaagtaagagcctttcttgctgaggacatagtttcttggtgagtttcactgttaaggccaatctaaaatgtccctccacgttctctccaaaccttatgtttcttcacgtgcactctgtacctcacctctgcatcttccatgagcccctcacaccaaaccaggatccacccttccagacccatagctcttgacctggtttgtcttttccatcccaaagtaaaactaagtaccaactctttaaaactattatgttttaattcctccagctttaagcagcctggcctgttctcaacccacatatcattttggctaggggagaagtctagttctttccgcccacaaggctgtgtgtgtatctaagtgtgtgtattaatactagtaactttgcatgttttgtaaaccttgctttttgtgatatctcctgcatatcagaatgttgttttctgactttcacactattcgcagccgtagtaacagggcaatggtgcaacgaagaaaagaaagaggctgggtaccgcggctcacgcctgtaatcccagcactttgggaggccgaggcaggtggatcacctgaggtcaggagttcaagaccagcctggccaacatgatgaaacccatctctactaaaaatgcaaaaattagccggtcgtggtggcaggcacctgtaatcccagctactcgggaggctgaggcacaagcatcacttgaatcgggaggcggaggttgcagtgagctgagatcatgccacttgcctaggcaacaaagtgagactctgtctcaaaaaaaaaaaaaaaaaaaaaaaagagaaagcagagaaggtgttatgctctagtgacagggaggacctgtatttggggaagagtagaaagatctggattccaagccagggtcaaccattcaattgctgtatgaacaagtacttaattttagtttccctgttttcaaagtgagaataataatggcatatgccacaaatgttggcagagattaaatgagaaaaatagatgtgaaacatttagtgcagtgcactaagaggtgctcaataaatgttgattaatactagctattgtcactggttatcaatcaaaagacatttgttactgctgagtaaaaccatactgggcgcaaaggggctcgcagagaaagtagaaaaggtaagtttgaacctttaggaagcatttgatctactagagaagtaagaagtatatacttcacctgagaaacagcccaaggcagcataagtggggtagggaggtgcagaccagatacatggattcataagggccgaagaggttgagacctcttcggtctcaacccatgagaatgagattctcatggggtggggttaatcaagcacagttttatggagggagtgaatcttgagcctggatgtgaaagtagtttaatatctggattgctgcagagcagaggagaatgcttccttgggaagaggatcagaatgaggtcttgggggaaaagtggggtttgttctaggagtagaaggacattggaaaaggagacttcatgttgggaaattcaggaaaacaatgagaggtaagatgaggccacattggaaataaagaactgggaaccactatacgttttcaaataggggaatattatgatgtaaaattagtattttagggaaaactggtattgtgtctatgtgcacttgtgagtgagaccacgaagaactactctggtgttcagatgccagaagggtgagtactcacctggaaattgggaaggaaatgagtgaacctgatgtacattttaggaggtatttgtctattgtgctgaggtccataaacagtctttctctacagtacgagaaatgagtggccaaagggagagaagccacaggactccagctagcaaggcctgctcctcctccacctgcccctcccctgtcccatggaaatcatccagtctgaggcccctccttcaacagcaatgcagccaggagttcacaaagggaagcatttcctttccaaagactgctaagatggtttaccctgttatgccaggaatgttaacaaaattgcaaatgtacttttattcttttgttttttctcttttttttgagacggagtctcactttgtcacacaggctggagtgcagtggtgcaatctcggctcactgcaagctccacttcccaggttcaagcgattctcctgcctcagcctcccaagtatctggaattacaggcacccatcaccacgcccagctaatttttgtatttttagtagagataggtgttgccatgttggccaggctggtctcaaactcctgacctcaagtgatccacctgcctcagcctcccgaagcgctaggattacaggcatgagccaccgcaccctgcctgttttttttctctctctttttttttttttttttgaggcagggtctcaatctgtcacccacgctgaagtgcaatagcacaatcacgactcactacagccttgaactcctgggctcaagcgatcctctggcctcagcctcccaggcaccaccatgctcggctaactttagatttttttgtagagacagggtctcactgtgttgcctaggctggtcttgaactcctgggctcaagcaagcctcccacctcagcctctcaaagtgctgggattataggtgtgagctactgcacctggccacaagtgtatttttttttttttgagacagagtttcactcttgttgcccaggctggagtgcaatggcgcagtctcagctcactgcaacctccacctcccgagttcaagcaattctcctgcctcagcctcccgagtagctgggattacaggtatgtgccaccgtgcctggctaattttgtatttttagtagagacagggtttctccatgttgatcaggctggtctcgaactcctgacctcgggtaatccacctgcctcggcctcgcaaagtgctgggattacaggcgtgagccactactccaggccaagtgtatttttttttttttcagacggagtctcactctatcgcccaggctggagtgcagtggcacgatcttgacccactgcacgctccgcctcccaggttcacgccattctcctgcctcagcctcctgagtagctgggactacaggcgcccgccaccacactgggctaatttttttgtattttcagtagagacggggtttcaccgtgttagccaggatggtctcgatctcctgacctcatgatctgcccgcctcggcctcccaaagtgctggggttacagttgtgagccactgcgcccggccgccaaatgtatttttaaattacacattctatagctccccactgggtgaccaagtaagagtgcttttcttttctttcagtcaacaaatatttttctagcaactcccacatacccctgtgtactatcctatccactggggagaaaaatggtaaataagaccgtttccagagcatatgagggaaagaaacaaaaccacaacagatgagcacgccacactattccatggcacattaaatgctgcggctaaaacatgcaagaagctagaagtagaataatggcgatgggggccttctctgggagggatggtcagggaaggcatcttggaaggtgtggcctcagtgacaaaggaggcctgctcagcacccttgaagaggtccccacctaggctcgtggctatttctggacaggtttctggatgtgacggtgcctgtctgaggagaggggcagatgtgggaggtggctccatttcctgcaggagtcttgagatgcttgagtccctgggtgctggggaagtcagttctagatatcagtgggtttgtgtgaatggctaatgacctgaaatcaacccctcatcctgtggggcagagatgttgtttcaggcactgctctgaagtatggtggaaagcacagagttgcttggggtctcagctttacctgtcccggtctctctttttggtctcttaactctaggctggatggacatggccccttaaggaaatgaaagtgagtgactgagtcctagcagaaaaaggaggagatcttggagttcctgtcttccaacacgcacctctttggttgtgatggtgaagtgggacagtgccatctcagcagggaccttggatgtgctctagagggggtcttggaggtgtagcatcgttacatcccctcccaccatcctgcctacacagtggttttgggggcacagatatttcagagagtagtcttcccaagaaccctacatcaagtatgctaccaccccttcccattcttgattctggtcccctctttattttcctcatagtattcactggacctaacttatgatacatttgtttgttcactgccatgtctctggcacttagagcagtaactggcacatattaggcacccagggtgtaattcatttgattaatgaatgtattgaatggctgcatggatgaatgaagaggaggaacagagcagatgtctgaccagctcattctggcttctggaaggatcctgattgggaattttgcatctttccctccccacagcctcctagtcactactactaaagaatagagaccctgactcccacttttttttttttttgagatggagtcttgctctgtcacccggctggagtgcagttgtgctatcttggctcactgcaacctccacctcccaggttcaagcgattctcctgcctcagcctcccaagtagctgcgactgcaggcatgtgccaccacatctggctaatttttatacttttttattacaggtgagctttcaccatgttggccgggctggtctcgaactcctgacctcaggtgatctgcccaccttggccccccgaagagccccgcattcttaactactgtgtttggtatgtttgaattgacacttgcctcttaggaaggggaatctttttagaccctggggaaatctgtagttattgcaaaggccttttcctgcctgttgggcatttaccagatctttcttcctacacaaggagagcctcccctggttgaatcctgctataaatctcactagtgacccacaaacaggggtcccaatgtgacctgctcattaacacaaaaccgtcagcccccatacagcttcctgccttcccagtcgggttgaggcaagaaatttccattctgcccatgctgatgaaaccagtcgccagcatttacctttctaaggggtcctttctcctcccaccccagcccaccccagcacaagaatgtaagagagggcaaacagctgcctggcttcagttctatggccactcaagaattggctcgcatctgtctgccaggacagagagcgtcctgagggggctggtgtgtgtgttgtgtgtgtgtgtgtgcacgcgcgcgtgcatatgtgtgtatgggggagttcagtttcaggtaccacacatctggaagtcagagaaagaagccactgcacatgttagagccattttggggggcaatttttaaaaaaaaaaacatttttaatgggctgagagccgcctcgtggaaagcccggggcgggggatggagtagaaacagctgcgggagtgattcttgtctccatatatgtttataaggcactgagggcgggattagcagctcctgggaagtctggctctagttaccgtgtcagcctgtcctgggggcagtcacagccacagtgaccattagcaggcacccaggcctgtctttggctcggaaacggtggcccccaatgtagcctagtttgaacctaggaactgcaggaccagagagattccactggagcctgatggacgggtgacagaggtgagaggcactggtgtgagggacaagtgtcacaggcggggaggaagaactccgctatctggtggtggaaatgtgtgaggatcaaagtccccagggagagtaggtgttgcgggcggcagggtggtgggctgggcacgggctgggcataggctgggcaggaggcttcggggccgcggggaggaggctggagaagcaggagggcacgggcggccctagctctgcaaccccgggaaggactggtaggtggagttaaggatatttggacaaggaaacgctttgaagcttttctctcgtcctccctactcgggacctggtcgcctcccctccataaaaccattagctcctggtgccagccctatctctgctccatctctcgtggttccagccggtgcattcacagaccttctgccccgggggacgaggaggatttatggggggagaggagagggggaggggcatcctccagaggagggggggtctgaggggagtcgggcgtggaagctgttagtcccgggctgggggccggctcacttccgagctggctctgcatgacaaaggggaaggagcaagtgtcttctttgatctgccccctgccggccccacacacctgcctgttggtgcccccgccccagccgaggcttcgagaaggaaaatcaaaagggggcttggggaagggctgtgtcccagctctcctggaccctgctcgggccactgtcctctcctggcggccccaggacaaaaatacttcccgggctgatgacccgaagcacccgccgccccctcccggggagcctggggacgccgacgcgcgagagtggcgcagtgagccggggcgcgcggggctgcgctcgtcaggtccggggccccggggaggccgctgggggcgcgggtcacgcccagacgggggccccggaggaccgcgggggagccgcaggggccgtgtgtcccgaggcgcaggctcgctctagcagcactgacctgctgcgggtcccagggcctggggacaggggctctcgggggcggatagaggaacaggcgtgggttacagcaggcaggaggccaagaggcgggaggcccgggagccagcagggaagggctgtggcatctggaagatgcgtcctcagctcaggcatttgatgccagagctgccgcctggcgtcggcagtgtccccggtgcagctgctgggcaaggtactcggtgccgccctcgaggaccacggtgccgggaggggcaggggccgcctagggaggcaccacctcagccgccagagctttccgggcgggcggttcgcggcgtggcttgtacatttctcagagaagctgccttgagaaagtgaaaagtccttgatctgtacgcaggggttgggacttaggaaacccgctgagggtgagaagggcgcagatggagaggggagactcctccctgggtgcaggtaaatccaattcaccaaaatgttttaatcctacaaaggagagcctgagggtcagagaaataagtctctgggctggaatgagaggtaggcacgtgggggagtggataggatgggccccatttctttggatgttctgcagcaaggacaggtatgctttacaacagccgaagtggcctcccggctgccgaacggaggaacgccgcaagctccgctcttgaaattacttgttttcatttctctttgtggtttctcagctcattatttctttggaaattaggtcctgtgcagggttcccacagtttggggtaagagacagaagtcctagggtgggaagatgagcagtgggaggcggaggctggaaagaggccgagcttctttgtggggaacacgcagcacgtaagcatcagtgcaactttctccgcctcaccccggctcctggtctgcccttatccgctgagtttccacactgactctccatttctgttttctccagggaaccctactctggaaactgtcagtcccagggcactggggagggctgaggccgaccatgcccagcctgctgctgctgttcacggctgctctgctgtccagctgggctcagcttctgacagacgccaactcctggtggtgagtaagaggggctgaggtcctgcctgcacagccggaggcctccttcagcgactgagatgaggaggaagggcaccgtgtgtcacggtagtaccttgattcctgggagtactaagggcctcttttatcccaggaaaactaagaacgctctgtgtctctctcaacccttatctttgtaagggttccctgaggataaaggttccgttcatttgatttttttctctaatcctgtccacattccttttccttggaccttccctcatgcccatgaattgttagaaattgctcttgggtcaacaagaatatcaatacttggtagttttttgttcctttgttttgtgtgttttgctggtaggatatagaattcctcttttataagtctgaaggccagatgaggggttcacagcaccatgggtggctggctttcttcttatgttttaagggctgttgtcattgccaagttgacagggaaatggcaggcgatcaccacctattttgcatggtctctgccactagcatttttactcagatagcaaatctgcagccttctcatctaacactctatatggctggtagatgatgagcaaaagggagagcctctgaactggtggagagtggatgaggggaagctcaaagtgagacatggcagtgaaaacaagtagactagatcgtgatgtatgtaaagtgattggattttaaaggcccaaagggagtaccacgcaaaggattgattgctttccatggcttatcatgtacttgggctgcactgaactagtcactcctactcattgaatgaggcctgtgctctcctgttgaggtttggctctttttgccctctattaaaatgaagagctgctccccacccctcgtcttcttatctgcctgacccccattcttaagatccagttcaaattctggccatttccttataaaggcttctcttcagccataagggctattttcctatctgatcacagcagatccagaagcatatccagagtctgtctggggcatttggcatctcgcatgtcctttgtgttcatgcctcagattccttcagtttgtcctttgaaggccagcactctgatttactaatttttctttccagggccttgtacacagggacgcattcaataaatgtgttgaatgaatgacttaatgctgcacacaggcgtatgctcactcctgggcctttttttcccctttctggattgctgtcctaggtcattagctttgaacccggtgcagagacccgagatgtttatcatcggtgcccagcccgtgtgcagtcagcttcccgggctctcccctggccagaggaagctgtgccaattgtaccaggagcacatggcctacataggggagggagccaagactggcatcaaggaatgacagcaccagttccggcagcggcggtggaattgcagcacagcggacaacgcatctgtctttgggagagtcatgcagataggtaagaggccattacaagagggctcggccaaggaactgcactcgtctcgtttgggagcaattaagctctctcaggactggcacagggagagcccaaaggcagcctaagtgggctctctctaggcttggcagcagtgtgcaccacgagagaggcacacgaggaagcaggctctgggaggctgcagaaaccacacgcttgatgttcctctagctctctgccttccagcctcacttggggcaggttgcttgggactcactgagagggggcaggttgcttgggactcactgagagggggcaggacatctgagttgacttagagtggattaggagagccgcccaccgccactgcctttgtgtctcagtgcaaaaaagagccttgggtagagaaccagaaattgcagccctgaatgtctgttggatttttgcctcttccacttcaacctttgacagagagatagaaatgtcggccaaagtgttgatagctgtcactaacccaaccccatccagtcccagctttttcttttgaaagagatgtgtgaacatgggggaaggggtcagacgaaagaaaagatgagagggagagggccaagtcttctggattcctgtcccttcccctctcccactgctggccaaggattcttgggccaccctattgcttagatggaggtgtgatctgaggtctaattgttttaggtccttttgaaatgcaatcctctcctctctggcaagaaattgagaaatccggccctattctactgggtcttatccccagggccataaaagggaagtgttagaatgctgtgttccttctgcctgacattctcccagaacacctcccttcaaaaggttacctgaggctggagtttccccagagagggatttcagcctgggaggggagttggggaggtagagatttcttcgtgctcctctcttagggaggatacttggaaggctccttccccctcccacttattccagacctctttccctaccctctctgtcccatattgagaagtaatgcccaatgcagtagctcacgcctgtaatcccagcaccttgggaggctgaggcaggaggattccttgaggccaggagttcaagaccagcctgggtaacatagtgagacctctgtctctataaaaaaaattttttttttctaaagagagagagggaattaaagatgggaaaagtacacattgaaacttgctgctctcttgcttccttcggtatcaactcagggtgcataaaaggaaggtcctagtgttcctggggcagctttcccaaaagagtagacttggggttttagtgggatttactcatagtttattgattcttctcaaacccacctggcacttgtctcttctttctggcgaaaatcttggcagcacttcctgccctgcgttttgggcaatgaaactaggacggcccaggtgcagagtctcctctaatctcttcagtggagttaatgtttattgaagacctaaagtaggcctgatgttggctagatccttttcatgtgtatttcgtgtgcataaaggccccaaagtgaggctgtactttaggaaagaaaggggttggcaggaaaagacactccgctgggttcagatgtgcactaggtggccagcgaaagcaaaccctgtcgaagagagcccatctctctgtgccctattccgttacaaaatggaacccttctgtttgcctaattttcccccttcctttttatagcatcactgaaggctcatgctacctaggaggctgtcctcccttcctcccccctgagcccagagtagctcctggtgagtcctccctctccctatcttgagaaggaccgtctaaggcttcctttctcctttgaagctgctgcaaaagtcggtcaccagagggcggcagagcagctcggaggagcctcggcccgttgcccagcttctgcctagggagtttggaggcaacttgggctgctatggaacagagagggcatgaaattgttctgctgtctcctgtagggaaaagacgcatgtccctctagtagctcacggctgcttttttttagccgtttattcttgagatggttagagattcaacctgaactgttgcgtatatagataaacccccacgttgcttatccattctgaagccccgaattatctctttcttgctgaaggtagcaacagtagatggtacttagtaggcttacccaagggcccaaaggctgccccgtgaaggcagagctgcccacactcagcttctgatgaagacccgactgaaagaggcaggcagcgcaccggaggacaaatcaggatcccaaacagtcatgataggttcgaactgtcagagtacagaacgtctggtgtgttagttcagctgcaggtacgtgattttagaaggcaattctgagaaggctgattcaactctgaaaagcatgtttgctaaagaatgatagaaataaatcagacatatgtagcttggaaaagtgaaaacgtaaaaggcttaatagttgttttcaaacactgaagagctgtcaaatgggaaagggattatagcagagtgcaagtgcagcaggcaggaatcataaggaggcgtatttcagcttaatacaagaaggagcattctggtgattggagtcatttgaaaaagatggaatggattgctttgaaaacctagcccactggtctgaggaactgtgtagagggaaagcttccggtggctatggagggtagctcggggctgaagcttgggaggctccctccgttccaggatgccatgtcaggtggttgaggctgcattttaaggagatgaattcctcaaagtggggcccagaccctcctccctgagaggctctttggccatcttaccatccccagtgctccttgtcacattctgagccccgtagaccgggtcctgtcggctgaatcatgagtgtaacttcctgccatcatttcggtttttcttgggctattcctatttcacaactgaccagaagccagccactggttaatagagaaaaacggactcactcagcatggtctgtttgtaaacttcactgtgtcatgcccagataatcaagaagtagggccaagggagagatttctctagacctctcggttgattgcagactgcttccctttctaccttccaagacaagactctgggattctgcctggtttaatctctgagatcaggattgaatctgtttcctgctaagaatcactcccttctctccatatctaagtccctataagtatcatttgttatttcttataacagctttattgagatacataactcccataccatgaaattcagcattttaaagtgtaaattcagtggctttgagcatattcacaaggctgtgcaactatcagcactgtctaatcccataacattttcaccgctccacagagaaactgcacacccgttaactgtcactctgcgtaccccaacccccaaccctaggcgaccactattctttctgtctccatggatttgcctatcctgggcatttcttataaatgggattatagaatacatggcctttggtgacgggctccttttacttagcacaatgatttaaaggttcatctgtgttgcagtctatatatatatatatatatatatatatatatatatatatatatacttttttttttttttttgagacagggtcttactctgctccccaggctggagtgcagtggtgtaatcatagctcattgcagcctccaactcctgggcttaaacaattcttccacctcaacctcctgagtagctgggactacaggcacatgctaccatgcccagttttgttttgttttgttttgttttgttttgagatggagttttactcttgttgcccaggctggaatgcaatggtgtgatctcggctcactgcaacctctgcctcctggggtcaaatgattcttctgtctcagcctcctgagtagctgggattacaggcgcccgcctggctagtttttgtatttttagtagagacagggtttcaccatgttggccaagcgggtctcgaactcctgacctcatgtgatccatgctccttggcctcccaaagtgctgggattacaggcatgagccaccacgcccagcttaatttttttcttttttaatgtttttgtagagatggggtactgctatgttgccaagctgttctgaaactcctggcttcaagtgatcctcctgtctcggcctcaaattgctgggattacaggtgtgagtcaccacgcctagtcactttttatggctgaataatattccattgtatggataataccacattttgattacccatttatccgctgatggatagtttggttgtttccaatttttgcctgttatgaataatgctgcaagaagcattcctatgtccatttttgtgtggacatatgttttcctttctcttgggtataaaggcatactttcgagatattgtgggtttgcagatttggttccaccgtactgcaataatactgcaataatgtgaataggcaataaagtgagttgcatggttttccagtgcatataaaagttatgctgcgggccgggcgcggtggctcacgcctgaaatcccagcactttgggaggcccaggcgggcggatcacgaggtcaggagttcaagaccagcctggccaagatggtgaaacctcgtctctactaaacatacaaaaaaaaaaaaaaaaaaactagccaggcgcggtggcaggtgcctgtaatcccagctactcgggaggctgaggcaggagaattgtttgaactcgggcagcagaggttgcagtgagctgagatcgtgccactgcactctggcctgggtgacagactgagactctgtctcaaaaaaaaaaaaaagttatgtttacactattctatagtctattaagtgtgtaataacattacatcttaaaaaaagtacatcccttaattaaaaatactttattgctaaaaaatgctgacacagaaacacaaagtaagtacatgctgttggaaaagtagcacggatagatttgtagcagggttgccacaaaccttcaatttgtaaaaaacgcaacaccggccaggcacggtggctcacgcctctaatcccagcactttgggaggcccaggcgggcggatcacgaggtcaggagatcgagaccatcctggctaacacggtgaaaccccatctccactaaaaacacaaaaaattagctgggcgcagtggtgtgcctttgtagtcccatataccggaggctgagacaggagaatggcgtgaacccgtgaggcggagcttgcggtgagccgagattgtgctactgcactccagcctgggtgacagagcgagactctctctcaaaaacaaacaaacaaacaaacaaaaaaacacaacacctgcacagcacaagaaagctgagcatagtaaaacgaggagctttgcctgtgttcttaggagtggaattgctgtgtcatatgggaactctacgtttaaccttgtgactgttagccttagactgccagactgttttccaaagcagctgcaccgcttaaccattcccacccacagtatgggagggttctggtttttccgtgttctcaccaagttgttattggctgtctttttgatgatagccatcccagtggaggtgatttgggcttgcatgtccctgatagctgagtattctgaaacagacattttactgaaatagaacatacattatatgaatgttgaggtggttcaccacagcagtaaaggggaacatagttgggattttctgctggaaaatgatctgcgtatttagagggaccgtgatgagtgtctggaattgtaggtgctgtagatgttgttcccagggctcctgagttaggaggcagtgtggatcctgtggaagagagaggaagacagcttggatttttctagacattgtaattctagttcatttttgactcctggcctctgccactgtctagctagataatggcagcagtaccgacagacagatgtgcagctcatagagcgtgagaaatggcatctgtgagggagacatttctgctaggatacaacgtcctactcttgataccatgatttcttccttagcctcattctgttcgactcccatgttctgtgtgtttctgaatgcctattctcccctccgctgaggtctcccgcctaggaatctgcaggtcacacaggctcttctgcagtggatattaatgcaggccaggaccggagggacttgtttttttgtgtttttttttcttttttttgagacagagtctcactctgtcgcccaggctggagtgcagtggcgcggtctcagctccctgcaagctccgcctcccgggttcacgccattctcctgcctcagcctcccgagtagctgggactacaggcgcccgccaccacgcccggctaattttttgtatttttagttgagacgaaggtttcaccgtgttggccaggctggtctcgatctcctgacctcgtggtccgcccgccccggcctcccaaagggctgggattacgggctgagccaccgcgccgggccagggacttgttttcttccgggtggtttcgcagggctgagctggggcccagcggcggaagtaaaacagcagatttcagcccattataaagagacgtttccaagcgttagagctacgggaagcgaagccccctgccccaggggtgtcagcagagccgtggcgtgcgggtccgtcgggggagacggggggaaggacaggtccccgggagaggagagcgcacccgcttaccgccctggcctcattctgcaggcagccgagagaccgccttcacccacgcggtgagcgccgcgggcgtggtcaacgccatcagccgggcctgccgcgagggcgagctctccacctgcggctgcagccggacggcgcggcccaaggacctgccccgggactggctgtggggcggctgtggggacaacgtggagtacggctaccgcttcgccaaggagtttgtggatgcccgggagcgagagaagaactttgccaaaggatcagaggagcagggccgggtgctcatgaacctgcaaaacaacgaggccggtcgcagggtaagctgggcctccccggcctccccagcactgcagacctagggggctgttcccgggctgtgccaccagccgtggcctggccttcaaggaaacgggttagtctgaccgtgaagattcttacctacgattgcaaatttacatgtccacgttattgaacaaatccttttcaaaatgccccacttcccaatgggcatacgtgctttttcttttcttttcttcttttctttttacttactttattatttcacggttcctagaggacttaggtgcaatgtttggatcagaattccagacgtaaggattagagcagcgctcttgtcttggccacccctcctttgcaacttgaatagataatgcgatgggatgtttaggccgttagacctcatctagggtttatgctctgttaaaggctctggtaatagcagagtcgactttcaagaactgctgtcatacgtatccagaacccagtcaaaaaacacattcaaatactaatgacaaacacacttctgagctaggagattttagacataagtggaagtgtgagaagacagccatctgtttaaggctggaggaaacagcctccccagtctcatgtaatgtgactgtcttttaagcctcagtttcagcagaagcaaccatgcaggtttgaggggagctgggttcattgtatgtgcagagcacacctgggcggcagcttctgggcccctaggtggcatgctggaaagcgtgaaccctctctgcctgcaccttgttcctgaaaaccccccctctgagcacacatccagcctcctcttttctttgctgtcccccatcgtggctgcctctgccacacaagactggagggcctgccccgcaggaatctctgccttttgctgcttctgcatagccagtgttgacagggaccgagggcaacatgggcgtccacccgggtttcctctgagaaaggtctgcggtctgagcactgggtggtgagaggctctttctcctggaaaaagagctctcaggaaacagcacggacttctttcttggagtgttgtccccactcgggtctatgtcaagccagctggctctggttcccaggcgaggtaatgtaacaaagatgaactcactcaaaaatgagaatggtggccgggagcagtggctcatgcctgtaatcccagcgctttgggaggccaaggcaggtggatcacttgaggccaggagttcgagaccagcctgaccaacatggtgaaaccctgtctctactaaaaatacaaaaaattagctggacttggtggcaggcacctgtaatcccagctacttgggaggctgaggcaggagaattgcttgaacctgggaggcggaggctgcagtgagcctagatcacaccattgcactccagcctgggcaacagagcaagactccatctcaaaaaaaaaaaaaaaatgagaatggcaatttcttagaagtttaacggtggcaccctggtgattcagtaacaggatatgaatataagcctcaaaatgtctttacatagcaaaatcttaaaatgtgaactcatgagaggcggggcacggtggctgatgcctgtaatcccaacactttgggaggctgaggcgggtggatcacctgaggtcaggagttcaagaccaggctggccaacatggtgaaaccccatctctagtaaaaatacaaaaagttagctggacgtggtggcacacgcttgtaatcccagctacttgggaggccgaggcaggagaattgcttgagccagaggttgcagtgagccaagatcctgccattgcactccagcctgggcaacagagcgagactctgtctcagaaaaaaatagaaagaaaaaagaaaagaaaaaaaatgtgaactcatatattggagcacatatcaaagaaatggaataggaagtgtcttttgtctgaatggggatgttgtagtattggccggatggaatgtggtgcacctgtgtgcatagcatcatcagccatgggacatcaggtggagaccagagtgggttatatgcccagggtcttccttacgcttcccctatccagaggctatttttgtttcccagaaaagggtgtgtgtaaggtggggtcagtgcgtggtgatgttaggagttctggcaattgctgatctgtgattatgataggctaacccagggcagagagcctggagccatctcagatgacttctgctcagggcgtgtgtggagccacccggtctctcaggtgtcttggctgtctcccagtctatttgcccacgtctttgggtgtctgggcctgaggagtagagatgtcaatgaaggggttaagatccgcactttatctcctgactgcccagagtcgatccagtttttgaaatcttagttgaaacactgccctccccagtccccattgttagtagtttttctcccacctgatcttcaatcgggcattcttgctcttctcaggtattccttactctatctacctttgccttggtaggttggcggtaggttcctgtgggcagggattgccctctctgcccctttgcttcaaccctgtatgtgctgtatgtgggtgggacaaatggatatacacagaggagttccgtgttgcctcctcgggagaggtcagattcacggaggctgcttgtggctctgctgagctgcgctgtggtgtctgcacgtgcctgtgatcaggcaggtgacacccactcttcccctttcccctgctgctgggtctcactttattgcccttaattgtttgttgtcttgtccgggctgttatctggcagccttccctcccatcaggcttgttcctggcttgctcaccttccctgtctgtctccccgcttagccccttccttcaggccccacacctctcctcttccttaactccttatctctccctttgcctctgcctgcttcaggttgggaattcctggccccctttattttttatcctctctccaaggaacaggcctcggccatcagtcaccatctgaggccagaggtattcactgcttgcctcctcacacctacacacaaagttctccagcaaggactgagtgatggctgggatggaaaatagacaagtattttagaaccatattaaaaagaaaaaaagattatccaggatctgatgtcttgacacagagtaaatcttaggctactttgccagaagtttctcttggcctgcaagagcatctagtagctccttcttagacggtggcggcaacaccagtggctgatggtgttttgccactcaaggatttctaagcattttccagataaaagcctggtgcctaatcctgtaacattcctgtctgtcaccaggctcagcacaccattagatagaagtggaagaggagctgagaggcgcttttccagggacagatcgtagaactaaaacttttttctttttttttgagacggagtttcgctcttgttgcccaggctggagtgcaatggcgcgatctcggctcactgcaaacctctgcttcccaggttcaagcgattcttctgcctcagcctccctagtagctgggattacaagcatgtgccaccacgcctgggctaattttgcatttttagtagagacggggtttctccatgttggtcaggctggtcttgaactcccgacctcaggtgatccgcccgccttggcctcctaaagtgctgggattacaggcataagccaccatgcccggcgaactaaaacatttttgaaagctttttttttttttttttttgctttttgaattagcagtctgggctgaaaatcggcatttccccctatcgcctacaaaaggagcctatatatatatatatatatctacaaaaggagattttgtatatatacatatatatatataaaatcagtagtaaaatatgaaaaaaattgcagatattcctatctctacaatgtctttgaattcagggaaggatggagggggtgtttaagctggtgcacttcctcttggatttgttttcctaaaattctggtccttgccctgcagggtcttgctccgactctccttccccaactctgtctgagtgtttgcccctgcaagagatgcttatccgtgctccgagttgctaagtggcaaagtgcacagtttccaacccttaatgtttcctcctctcagcagtgccagacgcctgtcatccatctctaagccaaggaccatttccagaggaatgtcaggctgcagctcagacccagggcatttgggatggaagggtcattgcaggccccatctttgaagtgtctgtcaggatggggtgtcagttcctttatgtcttggacctggagctgcccggctaagtgctggtgcctttaaccttggggagagccttccttcctcctctgctctaagccagctttaagccccgagattggagtggataagtgcttgttattctgagtcctttctgggtggccttggaggttagtgagcctctctagagcttcagtttctccaccataaaatagtgggaataattccgtaccagaaaaaactcaggaagacttttgccaacagtcatatgcactgatgatggctgtgctgtctcttgcacctgcagtggtctctgcttagctctgaataaagacacaatctgggggctcttgaaaagaaatctaagagaaacccttgaaaaatgagtcctgactcagttggtgacaatagccatgcataagaaaatgctctgcagccggcttgcgttttcatcccgccatctgcacgtctaggcctgctgccagggttggttgccatggtgcgtcagcatgctgccgttgaaaagcactctgtaagcagctttctggtctgctcttgcttttacattttgatttgggataactcaagttcaaatctactccacgttgtggcggttctgtgacttctggggtagacttgttttagatgaaccgctcctgcaggcaggcccagctgcttgcagttcccttgcacgttgcttcactgtgttactccagctctcccaagggggcgtctgggggctgctcgggaggaagacggtggtcttgctcacaaatggatggtgtatggcaagactcctgatgactctatggagttagtgactacatggtaacatggggaaagggaccatttaattctcagggtatttgacaggatcagggagagttttgggctaaccacggctatgccagtgatttctgtgataggcttgtgatacaattggattcttttttctgacttgtgctcctattacgcaaaagctggacacattttgttattttgttttgttttgctttgtttctagagatggagtcttgccctgttgcccaggctggagtgcagtggcacaagcatagcttgctgcatcctcaaattcctgggctcaagtgatcctccttcctcagcctccccagtagctgggactacaggcaccagccacagtgcctggctgtattttgttggttattatttatttgtttgaggctttgatcaagatggagatatctttgttttccgattgtgaaaaggatgcattgattgtaacaggttttgaggaatgagaaaccagtagagtagaaagtgaaagtgcctggtgccatcctcccggctgatggggacaagttgccttgccgccccagggttcttttctgtggtgcctcttttatgttttccccctgagcacctgagcatcttggaaagatctttgcatgcatttgaaaagctatctatcccctaccctaccggcccctcctgtgtactaggcctgtggctaccccagccaccctctgggcctcttccaccgggatcctccttcttactgccttctttctcttcccctaggctgtgtataagatggcagacgtagcctgcaaatgccacggcgtctcggggtcctgcagcctcaagacctgctggctgcagctggccgagttccgcaaggtcggggaccggctgaaggagaagtacgacagcgcggccgccatgcgcgtcacccgcaagggccggctggagctggtcaacagccgcttcacccagcccaccccggaggacctggtctatgtggaccccagccccgactactgcctgcgcaacgagagcacgggctccctgggcacgcagggccgcctctgcaacaagacctcggagggcatggatggctgtgagctcatgtgctgcgggcgtggctacaaccagttcaagagcgtgcaggtggagcgctgccactgcaagttccactggtgctgcttcgtcaggtgtaagaagtgcacggagatcgtggaccagtacatctgtaaatagcccggagggcctgctcccggcccccctgcactctgcctcacaaaggtctatattatataaatctatataaatctattttatatttgtataagtaaatgggtgggtgctatacaat

SEQ ID NO: 4 - DNA, 71711 bp, homo sapien
aaatgctccagatcctcagtgttcaagaacctcaggaagcttcgcagtcctgcctcgtgcctgcttgaacagctggatgtgggcaggaggctgtgggagcgggccatgccagcagaatcccgccttactctggggacttactcttgtcacagcccctggtgtcctgagggtcatttcagtgtcatgtgagtattactgtggctattggaaaggatttggtacgagtttatttgagaagttaggagctttttttaaaaaaaaaaattatctttgataaatttagtagaatattttgaaagtactttttggacagtaatgaatgaacaaattgctcctgaactagaaggagggatctaaacacatcatctaagtacaacagtatgtctgaaaaatatctctgcttgtcttttatttgccctttaaagtctgtgcaaacaaatgtgaacagcctcaggactctaagaataatatttttctatggatgtgtatggacagataaacaaaaccccaagggagaaaaaacttctatttaaataaaaataaagatcccctacagctccatcctcctttgctcactgggtttgctgtatttcattttgagataaaagtagtttggatgattaacagttgaacaaaaagaaagtatttgtgtctgtctaaatctatctctatcaatgtaatctatcttatttctctaatcttatctatctgtcttatctatcgacctaactgtccatctggttttgaatattccgtattccagccataagtagtagatcttttgcatccctggggttaatggttccttgagcagacactgacactgtgccgttcgggatcccgtggggaaaacaccctcttcctcactggtcagtgataccctgtgctcacagctctactccccctcggaatctcctgtctgaagcccctgtaggactctgggatcctccgaatcggccctctccagctccaagcacactgggatccttgccgcaggaggttgctgttggcttctgcccatgctgtgggtcaggatctgcagccaacaggcgtgggagcttaggaaggcacctggtggtttctcggtaggaaaatagtgtggagtgtgtgcaatcatgtttgaggaagcgtcatgagagggtcactgtctctgtggtagtgtccttagggaaccgtctttgcctggatcctggggtcaggtttggcatgaactctgaacttcctccctccgcaggatcttcagtagaaaggtcctgtcctgaggaaatgctcagaggcacttctcttgctgaggaagcctgcctggatgtgtgtttttgtcctcatggagatgcacatgacaaattgtgtgcaatgcctcagcacagcccaacaggttttttctgtttacacttaactagcctacgacagcgggaggaaaccttaaatatttccttttcttcccacaaacgctttatctaataaaacaaaattactgcagatgaagcagggagtgatttaaatcgtcatttaaatcaaggacctgatttggtttggcctccctgggggaccttttagcttgtgctatgctgataacgtctctacagactaaaccgaccagagcagaaggcagggtggcagtgcccgtggtggggtggacagcgtgggggccggcagtgtcagtcactgagtgctgggttggcccctcactcctccatatttctgtaccagtaaaataggttgaaactgacatcgagggcagcttcaagaaggtggggagagaccacgagggcagtaatgcagaggctgtcaccctctggagctactgctcggggactgagaaggaattcagtcttgaatacatgttaacctcagttcccgctccttatctggactggctggctcccttctgcgccaagaatctgaagcccagctctgtaaagcagcaattcccaactattttccccctaaaatacacgagacgcactcccatggggcctatctagattgcaggctgcggcacagataaatcaggctgtgggttgggcgcagttcccagtaaaaccccacttctttctctcccactcaagaaagcagacctccatacgcgtaagtgggagatggtgctctgtcgccccagcccttggcgggggactcggcctgtaaaagctgccaaataaatatttactaagtgaaagatagccctgaatccacactaatttgtatttttttaaagtcattcataaactttagcattttaactattagttagtaattaatcccaataaaccggcaggattttgtgattgtgaaactgctgcaatgcgttggtcagcaggaatatttgttagcatttttatgggctcttaaagtcgtcttagctgtgttactgataaagccagccacaggctttatcagtcctgccgttggctgtcagcgctgcctggataaactcctcatccttcccgggaagaaacttctagcaatgcttaagcaggaggccagggaagagagaatcttgatactgcctgctcaccataggccctctgggggcctgccctgtgtggacagatgcttcatttcatgatcgtatacaaatcgagagcaagagtctcctagccgcgctgagcgtggggcacttgccacctcactgctgttggaactctggagttggggccaaaggatgtagcccctcctcgggggagggcagtggggtcaggtgaagattcaagagctcctctttgccttgtcatctagttgtcctattctggaggaattttaaataaggatttaaaaaaaaaaaaggacttatgtattattttaaagagcagccttgaataggcaggcatattttagtaaaaataattttttaaccctgcggtgtgaagactgccagtcaaatacagtgatggtcattatcactcacctgcccccgcccccaggctggaggaaacagagtgcagagttagaatgcttctggagcattcatggctgccgggagatgcccgagaggacgttgagggcagggcagggtgagcagggagctagctcaccttaggagtgcagagaccatcccaagcagggtctgcagacactgacttcaggtgaccaggcatggagatggcaggtgaaacaggtaagtatgccccaaaaatgatgggaaagagtgaactgggatcacttagaaatcggaagcaatacaacaaaggctaaacatatttgagtaggagttcagggtagacacgctcttggatatcaagagcataaacagaggagctaacaaaaacactgcagagaagctccatcgccccctgtagttaccccacctagcgtggctgggagaagctgatacttcttttctccgtggattcaggggcatttcccacctattttaggtatgccagtttgacacaatgaactttagacgtaacatttcataactgcgatataatttccttctgtttttaggccttgaacaaaattttctttaatgggaaagcacacattttatactgaattctaattatgttcatcttgttttttgaattatttagctacctctaatagagagtctgaaagatgattacattccacagtactaacattttcaatggccctgaaagacgtgagatgcattgctgctactattttatcaaattattgtttctaaaatgctgttttactcttctagtaggaagagtgacttttaaaacaatggatattggctgggcgtggtggctcacacctgtattcccagcactttgggaggccgaggtgggtggatcacctgagatcaggaatttgagaccagtgtggtcaacatggtgaaaccccatatctactaaaaatacaaaaattagccaggcatgatgacaggcgcctgtaattccagccacttgggaggctgaggcaggagaatacttgaacctgaaggcagaggttgcagtgagccgagatcgcgccactgcactccagcctgggtgacagagcaagacgccgtctctaaaataaaataaaacaatggatagtttgtccaacatggtatgttaaaagcgcagagaagctgaagaatgatgatgaagactaaaataacgatgataagcaaagaactaagcaggcatctgtgcagtgattcaggaggggtgtccatgaggggcggcttcggagcagctctccctgtaacttatctcacagttccctcctcctttaaggagtcagaccacggtgggctttgctttagagacatgccactgtgtgctttgttgctcgtgactatcccttcacctttctagaggtgctcgtcttcatgtaaagtcgggtgaagctttttcactcctggagaaaagctcttacaacatttttgggacaaggagcaggtgtgcctcagcgagcctgtcattatctggggagggggctccagataacacacttctacttgctttctttagggaaacgacatggtctcctcctgtaacactccccaaaagaagtatgaaagccgacataaaatacgaatatgatctttgcattaagtattaaatataataccttcaatgtagtatttgtgcttctctctatccagttctcagttgtttagggatcttctgagggcaaaccaaaaatgtcagtaaagcaaaaatatatcaataaggcatcatactgacgaaaacaaaaccagaggttttaaaaaataatctgggccgggcacggtggctcacgcctgtaatcccagcactttgggaggctgaggtgggtggatcacctgaggtcaggagttcaagaccagctatggtcaacatggtgaaaccccgtctctactaaaacacaaaaattagccgggcatgatggcgcacacctgtaatcccagctactcgagaggctgaggtgggagaatcgcttgaggggagtgggaggttgcagtgagccgagatcgcaccattgcactccagtctcggtgatagggtgagactccatttaaaaaaaaaaaaaaatgtagttatcaattttttgtttttgaccaaaagtatttcaggaactttgaagaaaggacctgaaaattattactcaggctggtatttagtttgctgacttttaactctcagagctgaacagtctaatccttgatcattccagagtgagtttaggaatttgtagtcatttcctttttactgggtatttgcatacatcactaaccagctgggattagaatgagcagtctctcgatgctgaaatggaatgatgagaactcagggccagcctgaaatgttcatcctcatcgattaatccttaatgaacactcatgcatagatgacatcaaagaaggtcctttgcaatgtacagggaagacaaaccagcttccatagtgtacattcttaaaggaaggttccaatagaccgatacacatagttaacattttgtatttttatccatgttttgccccaagattaaacattaggagtaacgtggacatttgctcagtgtcgagggaagggtcagtgcatataactaggaagaaggctatctggcagggttgggaacgtgacctcttgccctccaaagcctgggatgctgaagtgaatgcctccaatcttgcggtgtatggacacagagcgaacgctgccctctgaatacagaccagaggttagaggttaatgaatgggtgctctctccacactcaggatcccgttcaatagcggttttataaataagggcttaaatggggtcagaaaaggacctgcatattgcttccaaactctctacatctttttgaagcaatagtgttcacagatgacatccttccacctgggaagacagagatgaagctcttgtgcttggagaactggacggctactcctggctcagtgtgtctaaaaacaggaccaaatggaaaacatagtggggggggaggtccttgctgccccctattcttctctagtaatcccttaaaaaataattgcggacccaaacctctggcctccagcacattttccacttgattagaggcctttgtgaggtggggaaagggacctgcagacttgtgtattgtgctggggcctgaaatgtccagctgggattttttcccatcaaaaggggattttagtaaaaccattatcaggggcttagaggagaaaagctgttgagctgcaagtgagggggcagattagcattagcgggcttgcttctggccccagtggaggagcgggaaggtgtttgcagccacttgcacacaagttccttagtttctctgcaagttcctggcaggtgcagaggtaggaatgaatacaggagtgggaactaacaggcttgaacaatggcacagggaggctttatctctgaagtatcaagcggaaggcagcccaaatcaggaaggactgcaaggtgttgttgatacctgcttcagtgtgtagacggccgtgggactggcctcattgctgttatgtgtggccacgtcgcctggaatcccccacccacaacactcgacccctctcgacagtcttcatagacggcgacaggaaattcagaaactgggaaatggccatgctggagtcctttaatgggcgaatggacacctttagggtggggggtgggtgtgctggtagcagctaaaagagtacagaggaaggttaggaaagcagcagcagtggctgtcagcctgcaaatcagtgtccgggctgtgtggatttgcagactgagccacgggaacctcctggggagagggtttggggaaggtcccctacaagagaaacgtgcatcatcttgggattactggagccctcagctataccttcctctgcaaaacggagcacagaaactggagtcacgtggtttggatggagaatgttgaagccaatagagtaattgctgcctgaagggcccatgtgaggaatgtcggagccggcctgtcccggaaatgctttttcctatgtgtcctctgtacactgttgctctagcttcccggcagaaatggggtgtggatgaaaacaacgttggtcctgacggctgtgagcacagaactagagtgacagccacatgcctcccgtaggacattttcaggcttgcagtgctgccacctcagaggtctcagtcacaccaacatcctcacgccagcccagtggccacattcgcaagagatttgtctagagtcaaattcaaaggttgtttctgtggttacagaaagagggcctaccttcttgaaaatgaagcccagggccgggcctggtgactcacgtgtgtaatcccagcactttgggaggctgaggcgggtagatcacctgaggtcaggagttcaagacctgcctggccaacatggcaaaaccctgtctctactaaaaaatacaaaaattagccaggcatggtggcacgtgcctgtagtcccaactactcaggaggctgaggcaggagcattgcttgaacccggggagcagaagttgcagtgagctgagattgcaccactgcattccagcctgagcaacagagtgactctgtcgaaagaaaaggaaggaaggaaggaaggaaggaaggaaaggaaagaaggaaaagaaagaaaagaaaggaagaaaaggaagaaagaaagagaaagaagaaagaaaaagagaaagaaagaaagaaaaagaaaagaaaagaaagagaaagaaaacggagtccaggaaagctgttcttggaggctatgaatcaaggagcagccctcccagttcttccgaggagcagctttaggaactgctggtcctcagcgttcacacattcccctcactcagttctcattctggctcctcagccagccccgttttcttcttcttggctttgtgcagggtgatacgtgtttgcttttctttcctttacaacctgtattctctgtttggggtgccttccctgaatctgtattctttcagtgtagtcactaagaatggcatatttcagctattactttccaaaagttgcgcagggagatgttctgctttcataagaccttcacggatggtgccaggaatgaatgtaatttgccttatgcacaggccccaagtccctgaaacttttccttttttatttattctctaaccaaaaatgacgtctatattacagagcttataagctgtggctcctctagccaatacagcttggtagaagcatctgcaggggataactgcctccaccttttttcccacttctacacctgcccttcccactcacagtttgattccccgaggccaggctgttgagtaccaggagggcaagacccgaaggcctctcctgccctcagcctgtctcttcttgtgccattctacggaatctggctacattggctcagaagttatttttgtaagttctgctaccttgtcctaatgtcagttttctgtaggaggaatttaggtcacacaagcaactttacttcttcgtcagggctgttattattttcatcttcatagactctcttatattttatgaagatgtcttcatctgggcaataaagatactccttttaataaaaattaaaaaaaattaaaaaaaagatactcctaaaattttaaaatgttttttcctgaaaggctctctagaatttgtcctcacagatacacttctgatttttcttttgtaataaaaaaaactagctctttttcttgctgtttaaattgatacctccatgtatgactaaaatttttcccattttcttcctcccaaactccccagatatggcaatctaagaaggatttgtatgaagtgccctttaagaagaattagaagtttaaagagaaaaaaaaaaaagcattagaagttaatgtttgattctcttagctccaaaagcagagagctgcaaaataacacctggctctggggagtaacctcactgatattttaaaattcaatttcatcttttccaggaagtgaaattcctcatttgtcaactcttacgcctggaggaaatactttgcgggtgcgggtgaaagagaaaggaccagaggggatttgttagatgggaggaggttgtggttccccttgggaaatagcttccaactcacagacaatgctgccacctactgacaagaccaagacatgggacgtgcagacttcgtggatttctccactttctgtcttccacagtggaggacatttagttttgcattaaccatactttattgtactaccttatattggaccctaaaatcatgttcataaacttggggtaaagaaaaacacaaggtcggactcctagttttaataactccaggacaggtgtggatatgattcacagctgcttcacaatggggaaggtaaattgtgtgtaagagggttttttgttgtttttttaaagggctggggaggctgaagcaacagtccagaaggagacaataacagttttccagccctacctttcaataatgtgtagtgcttgacttttacctcttaacccacatatgcacatttttatttctaaagaaagcagttgtaggctcctgcaatctcagcactttgggaggccgagatgggaggatcacttgagcccaggagttggagaccagcctaggcagcatagcgagaccctgtctctacaaaaaaaaaataataatagtaataatgggcatggtggcacatgcctgtggtcccagctactcgggaggctgaggtgggaggattgcttgagctcaggaagtcgaggctgcagtgagatatgatcacaccgctgcacttcagcctgggtgacagagcgagaccccaactctaaaaatcaataaagcagggatgaagctgtttgctgctaaatcctgtgtcctacgttaatgagtttctgcagttccccttgtgattccattgaaaattagacccttctgtgtagggaagagagaggccagctgccttcctgggggtcatgctgttctgattgttgacatctgaccctgagcacaatggcagggcatctgtctcaagtgcacagacatcagctagggctggaagagccaatcctccatctactccaggctctggaaacttgaagaccttttctgcttcgtacaaccgtcagctgtcagctggatgaagttcagggggccacagaacttaaccatcctgcttttacagattcctgaaaactggctaaattctgtgcatctgaagtaaattaggaaaggtagaaattgtcactttcatcttgtcattttcgtgttgtttgcttaagacacacgtactggccatcttgtcgttgttgttgttcacagcagtggagttttgggcaatgaagttaaggtttaaattactgaaagcagaaatgcttgtcttccatctgagaacatgaagcatttatttgaggggcgtttgcgggcttaactgttacaatttctcccttactttactcatgtgtccaattttagcctcagtgattgttctagagattctcagaaatagcaggactaatttttttggctcctccctgtttagtgactacgtctcagaaagccttgccttgggctagaaaaaggtagcagatgtgtggccgggcgcggtggctcacgcctgtcatcccagcactttgggaggccgaggcaggcggatcacaaggtcaggagatcgagaccatcctgactaacatggtgaaaccccgtctctactaaaaatacaaaaaattagccgggcgtggtggcaggtgcctgtggtccccgctactcgggaggctgagccaggagaatggcgtgaacccgggaggcagagcttgcagtgagccaagattgtgccactgtactccagcctgggcgacagagcgagactccgtctcaaaaaaaaaaaaaaaatgtagcagacgtgtatgtaaataatgctagtttgaggccaagatttcctaaggagaaatattatgaaccttggtaggaaatatttcctcatatcctttttagatgagaaaaacaatgttttccaagccatagtaattccacattaatatttatgaaaaattaatgtggtctcaactgttttcccacagtccagttccagtgtctcagatccatgatgtaaggagtaattgttgacaccccactgtgtggtaggtctgatccttctggagtgtggattacgtaaatgggggagtaataaatataagaaggtgcctagtattaacaaattagacccttttactctttctggacaagtgggatttgtaactaaaacatctgtgaagtcaagcctttttgcccttgaatgaagagaaaatagctagagtttttgcaacttgattctactttataaaaggattgtgtggcaggtatttatagcatgtgaaatatgtgtgagttcctagctttgaagctctcatgagcatgtacttccagcattagtattctgcattactatgtgcaacaaagcagtgttttggaaactggctcaaatcctctgagagcaacaggcaacagatttgacagttagctacttcagtaccttatagaccatttaacaacatgtactagttttttggtttcctgaataaccctatataatgcttgcaaacatgtctaagtttgcataaggtagtgcatattaaatagtaataacttttagcatttggggttttttttttttttttactcctaatgaaaataatatgctttggtgtggcaccttttaagaaacttttttttaaggctgaggtagaaagatcccttgagcccagaagtccgagattgtagtgagctctgatcatgccactgcactccagcctgggcaacagagcgagactctgtctcaaaaaaaagacaaaaaataataatttttttaagagatggggttttgctgtgtcgcccaggctggtcttgaactcgtgtgttcaagtgatcctcccacctcagccgagtgagtagctgggactacagatgtgtgccgtgcctggcttggtgccacacatctctgaagagagacagggtggtgctttgcagtgcccctgtgagccgcctccatgctggtcaccttctgcattggtcattaagtctagagcagcccaggttctgacactaggttctcctctaattacctaggcaaaatcttttccactttgttaagcatcttttcccatttataaaattaaatgtaccacatctgccagatttgggaaaacaaaaatgttgagacagagaaaccgaacattgtgttatgactgagttcttccacagatcacactcacattcctgacctggtctcacttgggtttctctgctgcgccacggctgcagacccagttctcttctttgtaattgagactcatttgtttccactatcacaaatgcaagtatccttgtaagttttttataaggatataaagcatttgttccttaaacaactaaagtggccgggcgcggtggctcatgcctgtaatcccagcactttgggaggccgaggcgggcggatcacttgaggtcgggagtttgagaccagcctgaccaacatggagaaaccccgtctctaccaaagatacaaaattagccgggcgtggtggcacacgcctgtaatcccagctactcaggagactggggcaggagaatcacttgaacctgggaggcggaggttgcagggagccaagatcgtgccattgcactgcagcctggacaacaagagtgaaactccgtctccgtctcaaaaaaaaaaaaaaaaaaaaattgaagtagaagagtaatgaaataatagaaacttaagtcttctttttaaagaaaatatgtgcacttttctgggttaataaatagcaggcagaggaattccacttcgattgttttattgggagtgggggtttaacataccccactctggtgctgctcagttaagatctcaagcttactttcttttgcacctcaactggagggcttggctttacatacgaccaaatattctgggttggtaaaggcaactccagcaggcaaaatcagagcaatccctggaaaagaggaaaaaactgaaactgatcatttgtggacatttaaatttaccaattgtctagaaattccatacaagagctgagatatatgctcttgttccaactgtgcacttacctttgatacttcattaagtaaattattaatatttggcactgatctaaatatgcatgtcccatctgttttacaactttttaaaaaatttaacttgctgcctgatagttaaccaagtgcattgacagaaatgaggtaagtatgtgacccaagtctgagcttaggtttgaatgcagctttctaatttctaatgctgtgctttactcatgatccacattatttcatcaaaaagcctcacccctctgactcctcaggggttcataatggcacaaaatttaggtcttgccctctactaaagggatggaattaacttttaaaaggggtgatgtttgatgcagggaagagaaagagaacagagagaggggaccactagatgacttactatagtccctccctttctaccgcagaacacagcagagatcagaggccagggctttccctttcatagaactgggaagagacagttgtcagaagctgcatgaggtcttggttttgttttacaaatctgatcttttaatcaagaggttcttattctttagaaacacagtggtccctgggggccactaccctttccctttgaaaacttgaattcgaattctctaagtcaaaagtgaaaggttttgtttgtattctaagaccagcacctatctagtaaccacttcaggaaagcagcaggatttgggagctaggccatgctttaatttacatatcatatgtccttatgtaagagaaagttcatacctttcaaaagaaaaaggaacgtttgcttttttacatctttgttgttcatctgactcatgaaagaacatgatcggttcgagtttatttttaggatatactggtactggcttttagttttagtaaatgttaagttggacaagttaggggcctagcttgggagctgcagaaattggctgagccccacaggtgatttatagataatctttccagtaagaacattgaagggctacacacaatgacacttagaaaaagaagggaaatgaagctgttccttgactactacccagtttctgttgaggtttattacttctagatgataaggtttacacgaagtttacattatgttttttcagttctcaagtttcagcaaatacctgaaccaagtttttttctgttattctaagaactgccctggagtgccttttaacttttgtaccaccacgcaaagtgtactatcaattcatgtcctttagctcttctattcttcaatgcatttctcccattcctgtaggtatggcggggatcaacttttcataccaccaagagtcacccctattccctttgaagtactgccctatggcataagcttgttcatacggtgttcaaacagctaccgttcacttctatgagggtcaccttactggaaaccaaggtatgacgagtaactaaatcttctcatcaagcagaagggagctggactttagaaatggagcctgggccacgcagagtggctcacgcctgtaatcccaggactttgggaggccgaggtgggcagatcgcttgagcccaggagtttgagaccagcctgggcaacatggtgaaaccctgtttctacaaaaaaaatacaaaaaaaaaaaaaaatagccagccatggtggtgtgcgcctgtagtctcagctactcaggaggctaggtgggaggatcacttgaacctgggaagtcaaggctgcagtgggttgtgattgtaccactgcactcctgcctaggcaacagatcaagaccttgtctcaaaaaaaaaaaaaaaaaaaaaagatcaagaccttgtctcaaaaaaaaaaaaaaaaaaagacaggaaggcaggaagacaggaaggaagggagggagggagggagggaaatggagaaatggagcctaggtttgaatcctggctccctcacttactggttgggtaacttacggcaggaattatgacttatctggaaaacagggataatacctgtttcagcaggttgctttgaagattaaaacttacaagtaccttgtaaaacacacataggttctcaacacgttaattgctttccatccaaaaaggttgagagatgagcagttgaccttcactaaccactctaggtggtttatcatctttcccagagaagctccggctatatactaagtatgcctcattcaggataaggatatagctagacccatggtcgtaactttcaaacatcaatttgccgacctttagtcaagcgtatatttaacatttaacgtaaaaaggagacaaaacagaagaacgtgcttcacgttacaggtggtaggaatattttgcctattaaaatgaagaatgtgaatacagagcctaagacttgggtgctcaaatttttatcaattgaatctgtacagccatgcagtctcttggaagaaaaacagactaagaacccactgccgtgtaaccttcaggagttgtgtcaaatgctggattagaaagctgaccctaattcagagtccctacttcttaataggcttcacacttttttttttttccaggcattaagcactgtaacctaagtgggaagaaagagatccacaccttccccaaagaaacagaagatggatctagtgtcaggctcaattagacccaattgtgatgactctccaaaaaggaacaatgcggcttttgtgatatgctcaggcagaaagcttggacattttacaaaacaatcttatcccaagagaaacctgggttccagccctcttcctggaaagaggggttgatccaggaaagttttatactactcttatcagctcttgctgagatcagtattttttttaacaatctcagaaacaacccagaccaatgtgaaaccaggaatatgaaccactcccctgttggagcactcacacccataggtctccacagccaaaccacagggtgtcagattattttgttactgtctaccaaagggaactcttgctggaattctggtatttcattaatctgccccgatttcagtctaaaaacccttgacagagtggatccagcggccagcctcggctattggaagtgctaaaatgcaaatgtgcaaaatcctggccaagctccccatcccccaggaaagtgcttccttacagccgggcctggaggggaatgtgaaaaagagggcttgagctgccctcctcctctccacccggaccctcgctcacactgggagattcagtatgcatgactgagccggcaagcacgcaaggacagcgctcttttaacttttctcaacaatggcttcagtccttccaccttcacatcctccccacacccactctcagggtaaaaaaaatccatctttcttgcccacgtcgtgaaccacttttcaacatcacctctagatctcattttcacccaaagaaaaactggccactcggggaaactgtgacttacatacaaatctggttttttaaaaagtttcattttgttcaatttctttaaatttccacgttgttgaaagtttaaagccaaacattatataaatctccagtctaatcacatttctagaaacaaaacatgtcagtagtaaaccttatacagaataaaattctacccatgagttgactcacccccacataggatgcaccaaactccaccttgcgtcctcttagagtatacaaacaacacctcctaccttggcatgtacccaagcacacaatgccttaaaaataattcgcagatacaaggctgttgttttttttttttttttcaaaaacatacttcatatttcctcttttattatataaatatcagtttaaccttttactgtaagaatataaacgttttaagaggatctttgttattatttatacaaattcacaaacagtacaattaattgataaaggtctctgggtttctttaactccatggtcttgcatgttgctgtggagggttctaaagaaataacaacaaaaatccaacgaaaatatacatcctactcagaagtgatttctttaaagccacaagtcccaacccccaccaaaagaaagaaagtcatctattcctccatttagaaacggaattttttaaaacccacaaactcccattttgttaatagaacagagataagatatgagcttcatcacagccccaggggctctgcaggccagctctgctcctgtttcccacaggaagccgcactgtgtgacctttttggggggaaacttggaagagggtgagggtagggcagaatttgcatatataatcatcattttcaagacacaatctgcatctccaacaaaaacaacggttcaactctcattgctcccacatatttgtgctataaattaagatttagaaataggtcctcaaatcccaatgaacaaggagaaaaaggaaattatagccagaatgtggaagtggggcacactggacggatggaggctgggaagaagccaacacaaaaagacggacaaacccaagggcatctttccagtctaggcacaaacatgtttcagtctcaaaatatctctcttgtagaattccagggcttcagaaaaaaagtaaactaaaacgaggtagccagacatatatatgtatatatatatatatataatttatatatatataatatatagaatatattcagcagaaaaaaggaccatgatttcaaattttttccaaaaaaaaatttttaaacaggaaagaagattaagaacatgaaatgagcatgaatagcagagtactgtaagaggaggagtgatgagaagagactgggattagttacaaagtggaagggtgaaaaggcctttgtagctgggtttgctttttatacatttcaaaataaaaaccagatcacagtattcaaatgaaagctgaagtgaaagcagacattttcctcaactccccagggttgaaaagaccagtcactccccacccccatttccagtcacagcagtggggatacagtagctgaatcagtcctccaccccctgcaggggagtgggtgggtaagcagcagagtccatctctccatccgcggggaaaaggagctgggagtagggtagggtaggaaccccagctgcaaagagaatgggctggaagccgggagggggctggaggagggaggaggaaacgagcctgaggcttctgtcatagccccatctcatccgctgcaatgatctgtgcgtaagtgtgcgtgtgagtgtgtgggggcggtggtaatgggaggatgaacagggcgggacaaggggagctggtgctgccgccctcacctgaccttctcactgtccgtcatctgccagagtcccaggttgagtaccttgaggcacggcagctgcgtgatgcgctccaggccgcgcttggtgattcgggtgcagccgtacaggtctatgccggtgagttggctcaggtgctcagcgatcagctccaggcccttgtccgtgatgcgcacacactgtccaatgttgagcgtgcgcagcccgtgcatctgccgcaccatgcggttgatgccatcatcactgatgtggcaggagcagagggagagagacttgaggccatccagcccctgggctatgtaagccagactctggtctcccaccttgtcacagaacgaaacatccagccccgagaggcgcaggctgcccatggccagatgcatgatgcccgtgtcactgatgttgtcacaggagcgcaggttgaggctgcgcaggctgcccatgtgcgacaggtgcaggaggccagcgtccgagattcccccacagaagctgaggttgaggagcctcaggcccgtcagccctcgggagatgtgctttagagaaagatctgtgagcttctggcagtcctgtagcgtgagctgctccaggcccaggcagccctccgccgcgctgcgcgtcatgccggccaggtgcccgatgcccacatccgaaaggtggcggcagctgcggaggttaaggctcttgaggcgctgcagaccccaggcgatgagcagaaggccagtgttggtgatgttgctgcaacctcccagctccagcacctccaggcccttgaggtactgggctatgcggcccaggctgctgtcagtgatctgcttgcagaggctcaggttgagagcgcgcagggagccgatctcctgcacaaacgcgtggcccagcccgttgtcggtgaggttgtagcagccgctgaggttgaggctctcgatgttggccatgccctggatcacgtagctgaggctgcggcggaggctcaggatctgcacccggcggatgccccgggcctgcaggctggggaacagcgacgggttggcccggcgcaggtgcagcttggcctccaccccccgccacaccgacttgtggtaggcggcgtcccgccaggcggtgcacacctgcgccgcgcgccccttgtcccggacgtccaggtagccgaagatcatggccagcagctccgggaacaggcatgagatgtgggtctccatcttcctcctcccccctccgcggcgctggggggaggaggcgcgggccccgccgctccggcctcgggcaggcgacgagagcgcttctccccagccgccgccgccgccgccgccgccgcctcgggcccaacggccggcccctccccgccttccggctccggccgccgccgccgctcctcctcctggtccgtccgtccttccttcctgccggctgcgcctccggcccggccctcccccgccccgggctccgcacggcgctcacatcccgggcggggaaggcgcctcgctctcgctcccggaggccggccgccgccgccgcctcggctctacccacgccgcgcccgggccgcgccgctccgcccgcgccgccgcgcccacgccccctgccgcatcctccgcctcctgccgccgccgctgctccgcgggccggcgggcggcgagggggccccgggggccgggcgcacgggctccgggcgcggaggaggcttcctgctgcctttgtctctcgcccgcttttcaaacctcccagccccgggccgcccgcactccgccgcccaggcggggggaccaggaggccaatcccggccggcggcgtgcgttccttctcccccgccgtccgcggccacttgggagctgccggcccccgcaccaaggacgccgcggccgtccggccggagcgcggctcggcgcagaccccgggcgagcaggcgggccgtgcgtttggtagcgcccgggccggccccggctccgccgccctgcagcgcgtcccctccgccgctcccgctcccccgcgcccgcgcaatggtacgggcctgcgctgccggaactgtggagccgttgccctggaaaccgagttcggcctggtcccgtggcccctgatttttaaccctgtgggcgccacgggggagcggcagctgtcagcagagcgcctccccacccggcttcttttcacccggtagcccgttattgagccgttccctctctgggccacgccccagccccgttccttctttttctttgctgttgaagtctgcgcagccccttcccacagtttacccctgcaattcgttacccttatttcacacccctctcccttgattatccctgcgagagccgcctcctatagcagtgctcaataatcgtcaccccaactctccttttcttactgtccctaatgccccttaacgcctcattatcacaccccctgctcccccggttggggctgtttactacgacgcctttctctccagtcttgtgtcttaaattggagagaaactcggctgtactcatcttaaacaatgaccccctccagtcggtgttctagaaatttctagaattatccatgactacttccttctagcatcttctgatggtttccagacacgctgtgtgtgtttccctcggtacttgatacatcaaaacttccctctacttctgaacgctgctgcgccaccaatgccctcagtccgctttgcttacaggggaacagccttcccctaagccttgttttaggagctttctccttgtcatcagccttagactatcagttgtatggctcagttgtactgatagtcaatatattcgtatatgctgaatccaatttactttttgattaaaatggaatgacagttgaacttggtttaagacaatccagtcgtgtctgttggtttatcaaccgttttatggaagcagggcacaattccattctaggatgtagcccctgggtcctaaatgtccgtactaaggatagaatttcagaagtttcattttaactacccccaaaccaagaatttttggatcagagaaaatgatcctctgtattttaatttatggatccacacaactagatacaagaccagcggatttatcagaaagggaaaatggtttcattgattctttgaggacctgaacaagatttggaaggggttccatattcagtgtaggagagtaacttttgcccaagcaaccactattagaccaaatacatacagattcagtaataggcataatacaccttttacacccctaccactcctctttcctaaatcaggaaatgcagaagcaaaaattctcgccagcttgttacctcacccacattacacgcagtgtggagcccatagatttttataaccttcttgaaaaaatagactgtactgttagtcatccagtacatccagatgtacggtggcagtaagtgtcacgattctggggtatgcctgggcttcactcttctcctggaggttatctaggcttttattcttctcagtcacttctgcctaaacgtttaccttaaattctgcgcaaaagtcactttttgattgttctgtgcacctagatgtgtttgggttgatgtcaaggccttaatccaaagcaccttagtgtaacttaatcctgcttaataaaaaacaaagtaccccacacatttggggggaattttagacaaggggcctgaccagcctcggactaagaaggagcctaatggttttccttctctagaaaggcccttgttctcaaatctgaagagtcattcagaggtatctggaagcactttctctagaagttggccatctggtcctcgttctaacaacagtttttcttgaattctagaatcttattaacacaaagccttttatttaaggcactcaagtatatattataaggattttcagcaatatgactattttcaccttcaataaataggaaaatatagcatcaagaagcatcacagaaaaagcattcccggggaaaaggaactagggcgtagaatgagccctatgccgaatctgaacacctggtgactttatgctactgaggaaacgactctcctttctgggtctcggtttccttgtgtaacaccaggatgatttgactaggtaatcttcagggacctttccagtaggaacactctgaggccaagagcctagcatactgtctccttaacccatggaacaattacacattgttcctaatgcaggctccagatattaagaataacttcgaatacaataacttcctgggagctttggtttatgctcagacttaggacacaaaaatatatgaagaatatgtatagacaggagactctgattgtctggcaaagatgtataccaatgtagaaaatcctgtggcttgctcttcatatttttaaaactggttgagatttttgtatatgatttaacaagttgcaaccataagttttttaactagcctatttaaaagcagaaatgatagccttgtgtagggagtctctccaaagccttacaaagaattttttttttaattctagatttttcagatggaatgtgcttttcacctgggtagggtgggaaaattgagaggcccaacccaaagatcaggcttacctaaggattcatactttctccttcagaaggggaagacctggcaggaaagatcagaagagctctgtagcttttaactcctcattcaagtatatatatatatatatatatatatatatatatatatatatatatatatatctccaaaaatagtggcccagagtctagtttatgggttgggtcagaggagttaacataggccgggcaaagtggctcatgcctctaatcccagcattttgggaggccgaggcgggatgatcacttgaggccaggagttcgagaccagcctggccaacatggtgaaaccccgtctctactaaaaaaaatacgaaaatattagccgggcatggcagcacatgcctgtaatcccagctactcgggaggctgaggcatgagaatcgcatgaacccaggagacagaggttgcagtgagctggtactgtgccactacactccagcctgggcgacagagcaagagaccttgtcaaaaaaaaaaaaaagttaaaatattttgtgtctattttccttgaactctagtgtatctatggcacaatgcctgctatgtagtagacattttgtcagtgttgttgaactgaagtgaatgagatggataatataaataataatctctttatgaaagacttcatacatatcgaaacttcttcgagagttctgggcagccattagtaatctgaggtttataataaaatgctgcctttccaacttcaaggtttcttgagagtaacattcattctgttgctcagtatttctaagtaggagagcatctctctcgacacttcttcgtgacagaatattaaagataagagagggtgaggatttgattcactgattgcaaataaaagatttaagcagaaacaacaaccaaaaaaagcccaatttaaaaatgggcaaagggtttaaatagacatttctccaaagaagatacacaggtgatccacagcacatgaagagaggctcaacatcattagtcattagggaaatgcaaatggaagccacagtaagataccacctcatatccataaggatagctactattaataaaacagaaaataacaagtataggtgaggatctggagaaagtagaatcctggtgcactgtgggtgagaatgtaaagttgtgggccaggcacagtggctcacacctgtaattccagtgctttgggagactgaagcgggaggattgcttgagcccaggagttcaagatcagcctgggcaacatggcaagaccccatctctcttataaaaaattgtgcagctgctatggaaaacggtatggccatttctcaaaaaattaaaaatagagctaccgtatgattcagcaattctgtttctaggtatgtacctaaaagaattgaaagcaggggttcgaagagctatttgtacatccatgttcatagtaatgatattcgtaataccaaaagttagaagcaacccgaatgtctattgacaaatgaatggataaacaaatcatggtatatactcacaagggaatattattcagccttgaaaaggaaggagattctgacacatagtgagacatggatgaaccttaaggacactgtgctaagttagtaagccagtcacaaaaggagaaatactgtacaattccacttatatgaggtatctagagtagtcagaattatagaaacagaaaaaataatcattgctaggggctggggagagggctgatgcagaatggggagttgtttaatggatatagagtttcagttttacaagatggaaaagttctgaaaattggttgcacaatattgtgaatatacctaacacttctgagctatgcacttaaagatggaccaggcgcggtggctcacgcctgtaatcccagcgctttgggaggctgaggcgggcagatcacctgaggtcaggagttcgagaccaacctgaccaacatggagaaacctcgtctctactgaaaatacaaaattaggcgggcgtggtggctcacacctgtaatcccagcactttgggaggctgaggcaggcagatcccctgaggtcaggagtttgaggccagcctgaccaacatggagaaacctcgtctctactaaaaatacaaaattagccgagtgtggtggcacatgcctgtaatcccagctactcgggaggctgaggcaggagaatcacttaaacccgggaggtggaggttgcggtgagccaagatcgtgccattgcattgcagcctgggcaataagagcaaaacttcgtctaaaaaaaccaaaaccaaacaaacaaaaaaaggttaagatgacaaattttacgttgtgtgtactttacaattaaaaatttaaaaaagattttagcaggacaaacattttgaaataaagatagaaaaaaagagagaaaaataggtgaaaagtattcttacatcaacagattgccgggaaccccctgagatatttgagatgttcccccaaattattagcttgctgtatcttgtaaatgtaggcttaggatcatctttatccactaccgtaaaaataagggcttgtgatctgggtagccagagccttcccgtgagggtgaatgtgtgctatattgtccacactgggaaacccacggaggtgaaagggggtgctgtactattagtattcacgcccgatggatggtcacgcccttttactcttgaaatcgggttgccatttgtaatttgttatttgcagcttttgagtgttaactataataggtgtttttgtagtttcaggcacccaaccaaagaatcagaaatacggtaatagaataatctcagatatcaggtattgtttgttcaatgttgacaaacaccttaggtacttgttacaaaacaggtagatagaacaactctaggaaaataaagtgtgttgtaaatgtagccatttccaggtcaccgaacacttagaaagacgggttttcaatttattcaatcattcaggctgggcagggtggctgtaatcccagcactctgggaggccagggtgggaggattgcttgatcccaagagtttgagaccagcctaggcaacatagcaaggtcccatctctacaagaaataaaaataaaaataattagccaggcgtgatggcatgcacctgtagtcccagctagtcaggaggctgaggcaagcgggaagaccgctgggccaggaggtcaaggctgcagtgaactgtgcttgcccccctgcactccagcttgggtgacagagccagaccatctctcgagaaaaaaaattcaggaaaatattaatacaaattatatacattgctctgtgctatgaaataaacaaagatgtagaagattacgtttttgcctttaagaacttgggatccagcaggtgagctagaaaatacctgtgacagtgacagtatttgttagtgttataagtgccagcagagtgatagaaataaagttctcagtttggaggatccatagtgaaacctagaatttgaataggtgttgatgggaagaatgtcattacattatagtggaaatttttttagagaataggctgaagttttatattgtttagaaaaaaataagaacattacaatagcaaccatgtattgtcatacattgttatggatcttccatattgaggcatcagttaatctaaaaaatctaaaaaatcactttcctaaagaattcttggcttttatttttcccaagaataagagatctggctgggcacggtggatcattcctgtaatcccagcatttggggaggctgaggtgggaggatcacttgagcccaagagttcgagatcagcctgggcaacacagggagaccctatccctacaaaattaaatttaaaaaattagccagacacagtggtgcgcacctgtagtcccagctattcacgaggctgaggtaggaggatagtttgagcccaggaggtcgaggctgcagtgagccgtgatcacaccagtgcactccagcctgggtaacagagagagagaggagagagagaaaaaagagaaacctttaactcttatgtatctggaattggaaattcagtatctgaagtcagaaaattttaattcatggtctggactttgcaactgtttttacaaccgagattgcctcaaaaaaaaaatttgttttagtcagctctctcctcatttgccccattcttctctctaacaatagaaccagacaaggatggaaaaagagggaagttcagggtgtcctgcctgtggcgtccacgtgtgactctcccctacgtgcccgtgctttctgttcccattcccgtgagctgcgttcacaccatacttggagtctgaagctgtgtgtttgaatccttgccctcccactgtagtctgttgcctgacctatggcaaagtcactcaattctttgagcttcaatttcctcatctataaaacgaaagtgattgtcgttcacggagctgtggtgagatgcgttaagaaaacatccacgagaaaggaagggcctagtgcatgcccggcacatagtagggacctagtaaatgctgtttttgtttttttcttgtataaagatgcactttgaaaaagaaaaaaaaaaacccttacagatgtgcctcagaattatacagatgtacatttactgacagtgacacttttttaaaactgtacttcctgttttaaagaaatgtgcaggttcgaagctgggcgcagtggctcatgcctgtaatcccagcactttggcaggtcgaggcaggcgaatcacaaggtcaggaattcgagaccagcctggctaacttggtgaaaccccgtctctactaaaaatacaaaaaattagccaggcgtagtggtgggtgcctgtaatctcagctactcgggaggctgaggcaggagaatagcttgaacctgggatgtggaggttgcagtgagcgagatcactccactgcactccagcctgggtgacagagcgagactctgtctcaaaaagaaaaagaaatgtacaggttcaaggactggaaacataacaaaagcgtaggcgcataagagaatgatctttcaggtagagccagccatgtgtttgcatcttatcttctcctctgtaagtcaggaagggtagcatgttccattcatgcgcaaagaaatagtccagaactcctcttctgccagacatccatccgtcctgtggccttggacctatggtttcactaccaactcttactctttcttttttctgagacagagtcttaccttgtcgcccaggctggagtgcagtggcgtgatctcggctcacggcaacctcctcctcccgggttcaagcgattctcctgcctcagcctcccgagtagctgggattacaggcacctgccaccacgcctggctgacttttgtattattagtagagatggggtttcactatgttggccgggctggtcttgaactcctgacctcaggtgacccacccgtctcagcctcccaaagtgctgggattataggcgtgagtcattacgcctggcccaactgttactctttcttttgcttagcgtggtgattctgaagcttgactaggcatcagaataaacttgagggcttcctgatgcaggacatctggggagaggcctgagaatttgcgtttctcacattgctgtcagcatcacctgggaactggggatcacagaactgagaatcgctggtagaacctcctagtacccaccttttttttccttctttaaaacttttgttaaattatacttcttaaaagctctctcttttttggcaaaattaaaatcctgtaggacaaaactatagtcccccgcccccctccatcttctgtcgtttagatcatgagctcctctgatacaaaggttgaaattttctccagtggtatggtggaaagaacttaggttttacagtcagatgaattctaggataaaatcttgactctgtcacttattagctctatgactttggacaaattatttaaccactaagaggctccattatctcatctatgaaatggaactagtgatttccaaatcttgggagttttgtgagggttgactggggtaatgtgtgtaacctcctagtatggtgacagaccgtaatgaaaacagcctaatgtttacagagcattgattgagcagtaggccttcttttaaggtctttacatttatgaacttccctaattgtgacaacagctcattttacagcctatgaagagggttcattactatctccattttacagatgaagaaagtacagcccagagaagggactggctcaagaccaaacagctggccgaactggaatttgaattctgtgatctggatctagagcccatatcccagccaccatgctttgctgtgttaacagtataagtttagcagtccgccttgctaggatgcagttactctatgatgccacgtaaagagaggtccatgacacagacagataaatgccacatgttctcactcatgtgtgggagctaaaaacaactgagctcatagaaacagaagtaggggtgaggcactgtggctcacgtctgtaatcccagcactttgggaagccaaggcgggtggatcacttgaggtcaggagttcgagaccagcctgggcaacatgtggagacccccatctctacaaaaatacaaaaattagcctggcattgtggtgcgcaccagggatcccagctactctggaggctaagatgggaggattgcttgagcccaggaggtcgaggctgcagtgaggtatgatcacaccactgcactctagcctgggtaacagagggagaccctgtctgaaagaaggaggctgggaagtgcagcagggaggggagggcaggagtaggttggttaatggatgtaaaattacaactagacaggaggaataagttctagtgttctaaagcaccgtagggcgaatatagttaacaatttattttatttgttcaaaaagctagaagagaggattttcagtgttcccaacacaaagaaatggttttcgaggtgatggatatgctgattaccctgattggatccattacacatagcatacatggatagaaatagcactctgtgctctataaatgtgtacaatttttacatgtcaactgaaaataaaaggaaaaaaagatgtgcaaatatgttttgagatctttaaagcgccatgtaaatgtgtggtatgttttgcttgttaggagtactgctgtcccattatgtatttgaacaactcctcataaagtacctttggcttggggaaaaaaaagagttaacagtgagtgtcatattgaccatactgtgagcaggatctggtcacggtgaggcatggtgatcatggaagacactcgaaggctctggttggtttgctagccaaaataggtcagagtgtgtgtgtgggggggggtgagagtgtgtgtgtgtgtgtgtgagagtgtgtggggtgtgtgtgggggggtgagtgtgtgtgagacagtgtgtgaggggtgtgtgagtgtgtagggtgagtgtgtgagagagtgtgtgagagtgtgtgagagtgtgtgggggtgtgtgagagtgtgtgtgggtgtttgtggggggtgtgagagtgtgtggggggtgagtgtgtgtgagtgtgtgaggggtgtgtgtagggtgagtgtgtgatagtgtgagagtgtgtgggggtgtgtgagagtgtgtggggtgagtgtgtgggaggtgagagtgtgtgagagagtgtagggtgagtgtgtgtgagagtgagtgtgagagtgtgtggggtgagtgtgtgtgagtgtgtgggggtgagagagtgtgtgtgagagtgtgtgtgtgagtgtgtgagaaagtgtgtgtgtgagagtgtgtgggggagggtgtgtgtgtgtgagagtgagtgtatgtgagagacagagggtggtgtgtgtttgtgcctgtgtgagtgtgtgtactgcagggtagatatcctgatacctgtttcatgccttcaggcccacagctggctgtggcctcgcaggaccaggaatgcgtttgtgtgtaattatgtcaccctctagcggtgacttccctactagccctttatccttgaaaagcccactcgggtgtcggtgacctctcttcccagtgacagcccgggagcagaacttcggggagattctggcatggagggacagtgctgggaaaagcggggtgtggccgggcatgaagagagtgccagggcccgggaagagtgaaaagtacaactaggactaatgaggagtgcaccctgccgagcagaaggggaagcaggagcgggccaggcacagcgtctggagaggagggaagagaaggcgctctcaaggggaggctcttgcgtgtcaatttctgccaagtgccattttatgtctgtggggtgggacggttatcgcagctagagctctttccagaatgtcagcactgagggccgaagtgggcgtggagaagcagtttcaattctgttttccaagggaagtaggcacaggtttagaggctgcctggagctgcctaaattccaaacgttcaccaccgtggagtggactgctgacttggctgcttctgcctagcctggggctctgttccctctgccagtaaaggtcattttatcaggatcctcagaggctttcgcatgttgataaatatttcaaaagacaagggggaatcaagatcagtcttactgagagcggatttggaactccgcgttcggcgggacgctgccgcccgaggcctgactgagccacagtgcgaagggtgctccctttttgaaaaggtgctggcgccaggccaggctttgctggaaagtcctatctggatgagtcagagcatttacatttcttacataatgtcagacccagaggagctttagggatcagcccagctacagagttcacagccaggtccccttttctgccaagaggatagggttaaaggttttaaaaaaaacaagcagagtctcaaggggcagaaaagcgaaggctcagagttaatgctgattaactcttcacaccccagaaaagatggttctgaggtaaaaccacacctttatgtcacatgatgccactgccttcctgaatccagtcattcctaaagaggtcagtaacaccaagcactgaccttcccgccttgtgtgcaggaaattaaagaggcatgaaaaccctgtccacattttctctaaagttggaacagcttgcctggggcttcagactgagcttcaatctcaagcttcagtgagattctttgttgtttattttttatttttaaactatttggccaggcgcggtggctcacgcctgtaatcccagcactttgggaggccgaggtaggcagatcacttgaggtcaggagtttgagatcagcctggccaacatggtgaaacctcatctctactaaaaatacaaaaattagccagtgtgatggtgtacgcctgtaatcccacctgctcaggaggctgaagcaggagaatcgcatgaacctgggagacggaggttgcagtcagctgagatcgagcaactgcactccagcctgggcgacagagcaagactccgtctcaaaataaacaaacaaactaactaactaactaactaacttactattgaaggccaaagagttcaagtaactaacataagaaatcagtggctactgttgtaaccatcaagaattctttaatgggccaggtgcagtggctcaggcctgtaatcccaacactttgggaggccaaggcaggtggattacgaggtcaggagttcgggatcagcctggccaacatggtgaaaccctgtctctactaaaaatacaaaaattagctgggtctggtggagcacacctgtaatcctagctactcaggaggctgaggcagaattgcttgaactggggaggcggaggttgcagtgaactgagatcacgcaactgcactccagcctgggtgacagagcaagactctgtctcagaaaaaaaaagaaagaaagaaaaaaaaaagaattccttaatttccttaatttaactggttcagggaacctaaatgagagttgtcacataatagcaaatcttagtgaccagatgacactcaaagcaggtgtaaatatttaacaaaagcactgtgtagacatttaatgacaatggttgctttttgtttgcttgctttttatttgtttacaaatgaaaataaagcagagaatgagaagtcactttctcagggtcacgggaacaattcaggttgaacgcatctctcctccgacatgccgagcgtctttgagtctcctcacccaggcgcacactcaggattgcagtcatctgctattgttgcctttatttattttgagacggagtctcgctcttgtcacccaggctggagtgcagtgatgcgatctcggctcactgcaacctccgcctcccgggttcaagggattctcctgcctcagcctcccgaatagctgggactacaggcatgtaccaccacgctcagctaatttttttttttttgtatttttagtagagacggggtttcaccatgttggccaggctggtcttgaactcctgagttcaggtgatccacccgtctcggcctcccaaagtgctgggattacaggtaggagccactgcacctggcctattgttgcctttttacttgatatttcaataaatttgtgagcaattggaatggtaagaaattcgctgcagtacataaaagtttgatcacttagactgctgtgtgattagggttgctcagtgatcttccggcaataaagggaggaaaaggagaaatttcagatggagtgatgatggatgtcctcaggcatgtcaatggctgctgaagtgctatgggaaaatggaaaacacaatctttgggatccctctttcagccattttcctgcttttatatctataaactttaaaaagtagggcatactttaaacaatagtatactaagaaattgtcaccgctggcagagccaaaattgaatcagcttgccttgtgattacatcagaaatgtgtcttagtctgtaaagcttcactacaggaaatgcccaggagctgctaataaagtttaatacacatttgcttccttaatgctatattaacatcctgaccatcacaactttcattgtaaacctattgcttattaaaaacaccctgtaagatgtcacaaactgacagaaagttggggctactacatgaattaatatgctaactagtatttttcagtgttatatagtataagatagtaagtgcttgaaatatgagcattttgaaatccttggccagcataatcccatgggtaacactgaattatccatggctgtgggagagagcaggtggttcacttccaaccatgggttgtgttccaaactaagggtttttgtttgttttgttttctttcttttaaagaaaatcaagtttatttttgaaactgttcattttaattctaagacaaagctagaaaaagaagaatggaagatctggaaaaaaagcattgtcaactgtcactgtcctaccatgggaaagaaatgtcttacaaacggaaaaaaaagttggagagaacgagaagtttctggtgttatgtaagaggaagcgcccagattacatataaaagtcaactgcttcacgccctgttactaaatattagggatgcaaaatacgtggtggcagtaagtcagagcctggtttcctaaatatttcttacatgttagggatcctgagagatccctaaacaagtagaaaattcttttttttttctttttgagacagggtctcactctgttgcctaggctgaagtgcaatggcataatcatggctcactgcagcctcaacctcctgggatcctgggctcctgggctcctggggtgatcctcccacctcagcctcccgagaagttccactacagccagccaccacgcctggctaattttgcatttttagtagagacggggtttctccatgttggtcaggctggtctcgaactcctgacctcaagtgagccacccgcctcgtcctcccaaagtgctgggattacaggtgtgagacactgcgcccggccaacaagtggaaaatactatcctgaatgagtgtgtgtgtgcctgctgggagaatatttcctagtgtttcctagatccttgttagttgacttcccacccacaaagccccagaaggagtaaactgtctctaaatatcagaataaacaacaacaataaaacaacttttatattttcatttctttttctttttgttttgttttgttttgttttgttttgttttttgagacagggtctcactctgttgctcaggctggagtgcagtggtgtaatcatggctcactgcagccttgaactgctggtctcaagcaattctcctgccccagcctaccaagcagctgggactacaggcatgcgccaccacacccagctaattttaaaattttttgtagagacagggtgtccctatattgcccaggctggtctctaactcctggtctcaagtgatccacctgcctcagcctcccaaaatgctgggatttccggcgtggacctcactgcccagctaaaacaacttttaaaaggtatattagagatccaactagattctactcttgcatttatctgcagcatatcagtttggtttgcccatggttaggtggttcttggtctgggtcttagtttcatgcgtctatgcatatgtggaaactcatcaagctgtacatttaagacttgtgcgttttaactctgtgtgttttgtttcaattttaaaaagtttttatttatttattttttaagtcagaaggggtttaatgggtcaagaaaagtttacttctgtgcacacaaattatctcaaggtctgtttgttcaaacagggtaaccaaacagggaccgattctacagtggctgctgcccggagttttacacagatgggagcatggccgtacccctgaaccctccaaccttctcttgcctgtgattaccactccttccctggccttttctggcctggctgctttcactgctgaagtagggcaaggattttgtttctcttcattacccttcaccttgccaggcctctgttcatcccatccctcggcccctagtacaaagtatgcagttagcactccataaatattgactttaattttgattatttttctctggttaatatgtgttgggggccgggtgcggtggctcatgcctgtaatctcaaaactttgggaggccaaggtgagaagatcacttgagcccagcagttcaaaaccagcttgggcaatacagtgagatctagtctctttttttttttcaaaataattaaaaataaatatgtgttggggtgggcagtgagtgcgggaaagaagggggaaagggagattgtttctaatgtacagacggggagacgtctggggctgcgtaggagctggggtgaagagcacaaggcattctggttttgcctctgtatttgataatgttttcttaatgttggaaaaatgcaatagttttatcatttgccacataccttcccatgctgttccctactgaaccaaatcaggtcatattatactggctatgttatactgcgctgttttccattgactttttggttattgatattggcttttagtgttgggtgtgtggtttcttttcacacaaacatgaatacgttgtaccactgagattttcctaggggttcagtcattttgagttggagatggtcattgggatgcatttttacattcctgttctcactttctttttttttttttttttttgagacggagtctcgctctgtcacccaggctggagtgtagcggcctgatctcggctcactgcaagctccgcctcccgggttcatgccattctcctgcctcagcctcccgagtagctgggactacaggcgcccgccaccatgcccagctaattttttgtatttttagtagagatggggtttcattgtgttagccaggatgaccttgatctcctgaccttgtgatccgcctgcctcagcctcccaaagtgctgggattacaggcatgagccaccatgcccggctcctgttctcactttcatctgtgggtgccacccagagcataggctttctatggaacagtgaatgtgcttacatatgagtagaagaagcgaggtttttcttatgcagcccgggagacaaggaaaccgctgtgatgccgtgtgccaatagcatgcatttatttgtggtatatcagagcctcagatccagccatcccagacagtcacgtccacaaggatgagacccttttgcaggagacagagaacacacctcccttattcctgctccagcagttgagatctgctggagacccttactcatgtttcctggacttgaactttaggacactggccactgggcattttttgcagagggtactcattagaatttctctttctgtcagttttttagcctattttttaagctaaatttctaaatgcttttgaaaccaacggtgttgttttattttgctgatagaacccagatgcgaggagggagttgtttttttttttttccttccatcatttgaatcattgcacaagcaccgtatcacctagaaacagagggtgatttcaggacagtgctgtggccacaaagcatggttaggtttggaaaagcagcagggaaaaaaaaatgccttctgattcaacacttccgttctatgtgatttaagcacatatctagttacaaggtttctttggcaaaaacaattttttgctctggagttagccaggcaaagccagcgtccccctggccagttgagtttgaggaccatctgcctcacacatcattagcagcattgtttgtttagggcccttctgtagaatctttattcatggagaagtagaagaaaactcaaacagctcagctggatttccaggtcctgcgtggaatttgtaacccctttgacttctcaactgagaaaattggatgcggctgtcacagaaagagaataaatacggaaccccacaatgctatgcttgcagccacttttattccattgaatttcacacataatgaaaggcaggcatactctgagaggcacggagctgaaccagtgctgggagtcctgcaattccaagtaggttgagctggtgataattctgggcaaaatactttagtcctctttagttggccgctggctaaagcatgcgggcagtgatacggctcctgttatcctactgcgagtgttctgcttttagaactaagaaaacggtgaaagaggaaagacaagtgattagttaacacctaaaagatgtatgccctcacgaataatcaaagaaaggcagtttaaaatttgatagcattttttccctattgtgagaaagaattttttaaaatgataatatccaaacatcttaattagcttttgtcatttaaagctaaaacccagtttagtgttttattagacttgactttcatgaaaggttgggaattctaaaaataacttattttgaaagagtaatgaatggcccaacaaacttaatggtccagttcaagctattggttgactggtcaatagatgctagagaagttaggactggaaaagacgttagggcttatgtggctctgccctgtcattttctaactgagaaggctgggacctagagacgttgtgtgacttgtctagggtcacacagttgtacggaggctggaattgcattagtaaaacatgatgagttgttatttagatcttgctctcagcaaatagcttcatataggattaaactttttgttttcaatacctcaaggatgttgagcttccctgtctttccagacagacaggatgtccgagacctcaaatcaggcactgttgcctcatttattctttgtccttagatgaacgagtggctggatacctctacatctttagaaaaaaattttttgagatacagtcttactctgccacccaggctggagtgcagctgcatgatcgtggctcactgcaacctccaactcctgggccaagcgatcctcccacctcagcctcctgagtagctgggactgcaggtgtgcatcaccatgcccagctaatgtttttatttttgtagagataggggtctcactgtgttccccaggctggtctggaactcctgggctcaagtgatcctcccacctcagcctcccaaactgctgggattgcaggcgtgagccaccacatccggcctagatctgtttaatggggataataatcctggcacaattgatgtccctttgataatcttgaaaccccttgagcaactacaaataaaaataaggcatgtacagtctaaaagggggataaacgtatataggtaagtctaatacaaaacagaataagtgttgtaagaggttgtattagttaaggtcttgaggttcctgtaacaaacaaatctcccaaatgtaaattggctctagaatcatagaaatttatttctagcccatgtaaaagccaaaatagatgttcattattatcaggcaggtctccctctggtaattttggggcttgggcttcttctgatttatcactctacctttggcctggttttgaaggccaccatgcttgtctgcatcaagctgaaagaagaaaagcgagcttggaggtctcctggttggagatttttagaggccaggcctgggagctgcagacatcacttcttctagtatacctttagatagcacccagtcatatgaccacctctttgtgcagtggatgctgggtaatgtagtccagcggtgtgcaattttagtgaccatcaagtgatctctgctacaatgggctttgagggcccaaaggaggaggacgtcatatgagagtgaagtaacttattggacaaatacacacatgcctaggagggtggaaataattaataattatttctactattaaccgtgattttgtcttaattttaataagagggttatatatctcttacatattacagataatcttcaggaatcttaggaattcctaaatttatcctaatatttaggaattcctaaattcctgaaaataaggtgggatatgtatctcaatttgtttgtattttcaggagtggtgactctttctgatccatggcctgtgcttacaagatagccggatcccatggagatcacacctgctccagctgtctcatgcagcttgggaggtgaccacagaaacagtgggccctccccaaagccacatgcggatagactatagtcaggactcttcatctccattcagcagtgaccagaggccagcggcccgaggcctgtgctggtggtttgttccagctgcggacatttgtcatcccttggctgcataaggcacagaccacacctcctcgtctcctttccactcaggctgacagtgctctccttctgccccttgtagtgtttctactgaatcagacctcccagctgggctcccaccttccagatgcttaccctccacactccatccatcattattggagcaaacgattaccagagcttttctaaatccacatctgatggtgcctctcccctgttcagatgcctcggatgtctcctgcagatgacaagagacgcccaaactccttataagggggccccaataggaaggttctgcttcacgaagaattaatgacttttgtttgtctttagattttggctttggttctctctctctctctctctgtctctctttctctcccccttccctcttctgttttctgaagttgaattttggacttgaaactacgtgtcatgtgtttttcaggcctctgtgcctttgctccttgggcgggtctcattctcctatctccagctgtgagaatcctgtgtgtcctcttagggacaggttcaaataccatcacccccagaaagcatccccaccgttggaacgacatagtctttctcagctgtttggatagtaattgatacctccattataacgtattgccctgctaaatgttataatcacatatgtttgcctcacctctacgagattcctgttattcaaccaagagttcctgttactcaactttgagtaagacctaatagatgctcaataatattagttgacttgaattaagagtcacagaaagaattccatttcgattactttttggcattttcactgggtctgaactttttcgtttactctgagtagcaaatttaaaatagcaaacaatttggttctgatcatgggaaattgctctcaaggtcattgcagaatggctgcttttcctaaagattacctgcaatgatggaagtataggttgtcattggaatagaaaatggttgtctccatggctggtaggtggggtcttgctcctgggcggtaggttagagtttgctacccttaccttgagtgccatggtactttgcaagtaactctgttaaagctcctactgcaccacgtttaaacaatggatttcaaatggaactttcggttttgtacaagtgatgatttgtgttcttgcctggcttccactctagaccagcactatgagacagtccataagctctctgtgatcatggaaacgttctataatccgtgctgtccaaaacaatagccactagccacttgtagctactgagcccttgaaacgtggcttctgcaatggaggaactgaacatttaatttaaattcatttttaatttaaatagccacatgtggtcagtggctaccatcttgggcagtgatattgagttcctaggagagtagcattgtattaattgattggaatatcctatacagtactgtgtattgagtaaacctacagtaagcatgtgttaaatgatgaacagttaacatttattgagtgcctgctgaatgctaggtgcttcccagaggctgtccttgtgttaccttcattttctgcagagccccgtgctggggcagcatagacagcaagcttgacccccatcattgcagccttcaccaagaaaacaggcagtcgagggagcaatttagcaagagggtcaggagttccgtgaaaagaagcctggcagagccataaaagaaactaaagaattttggtggtgaaccaaaagcctctgtaacctgcccaggcctgaatttggtgatcatgcttttgcctgaggcagccacagaggttatttaattctcaaaactagggcctgtgagacccacaaacctggtctgaggtttgctagcagggactctagttttggcaaagggaatgtgaactgcttagcattggagggggagacaggagagctgaccaccttggctctgaatgttctcatcggtgaggaaggaactggtgctgtgcctgagtgggcgtgaacttgttttgcctgtggttttctttagaaagctgcttggttcctcttctctcaaaggatttggaaggtcttccccgcacaatcaaaggagcagtttgagacacaggggcgacagctggggacagcattagagggacccacattacttagagctactggtttccccccagataaaaacccaggtgtcgtttctgcatgagcagtgagtgacgaggagaattcgcttgcagcctctccgctacgctctgcctttagagtccctctagccgtggtccctgtgttgccgcttgcccctgggtacctgactgatgaagacaggctctggggctcgccgttgaaggtgctgtggacccaggggtgctgtccttccgctgttccattcattgcaacattcatctcctgcctgtttacaaaaatgaagcaattatcctattcttccaaatggaaactgctaatttttgaagcagaaggttgacagcttcagtaagatctcaagagagcgagaagactggaatcaggtgaggccataacttcttatctaaacttagtttctggggtggaattacagaattgcttagaaaaagagtcaatataactacttgcagaaaataccacctgtaaaaatccagatttataaatggtgactatgcatttagtacaatgattatcatatatgtaatatataaaatatatatataatatgtatattgaggtccctttaaagaacagcatgatgggctggctcatgcctataatcctagcagtttgggaggctgaggcaggtggattgcttgagcccaggagttcaagactagtctgggcaacatggtgaaactctacaaaaaaatacaaaaattagctgggcattgtggcatgtgcctgtagtctcagctactcaggatgctgaggtaggaggatcacctgaccacagagagatcagagctgcagtgagccatgatcacaccactgcagtccagcctgagcaacacagtgagaccctatctcaaaaaaaagaaaagaaaaagaaaaaagaactgcatggcaaatttgaaagtcttttggaacatgacttgtgaatgctccaaacattccaaaatgaatgagtgaagtagccaggagaaagacagcagagagcagtggggatttgggaaagttagagaacctgtgtgccacccaccaagacattcatattccaaagatttgtaaacattgtgttagtcaaagacacttgggctgggcgcagtggctcatgcttgtaatcgcagcactttgggaagcctaggagggaggattgcttgaggccgggagttcaagaccagcctggacaatatagggagacccccatctccacaaaagaatttaaaaacttaaccagacacagtggcttacacctgtagtcccagctactcaggaggctgaggtgggaggatcgcttgagcccaggagttcgaggctgcagtgagctgtgatcatgccaccgtactccagcctgggtgacagtgagacgatgtctccaaaaaagaaaagacagctagctgactgccagttggtgatcctggttttaaaagttgcatggtttccccaggtcctttaaaaatacgctccattttgcaaacacagtagtacctctacttggtagcacaagacacatttttattctaattagcgcatggcatagagagaggttatccacctgcccttggtggtgatccagaagtccatttatttacttcattcactctaagtagacaggaatttgcagaaaacagtagcaattgcacaaataaatgtttttcccctatagtacaataccccagaactctagatctggtgaaaatagattacttgcaggacaagagcatctaaacacccctcaatcctccagcccttgaaaacaaagtccatagccttgttctcttgaaacaattcctaaaccacactgacctgtgacctatacacttctgccttcttttctagagcatattttaaaactattttattagtattcaggagaagggaacttcctctttcttatcatctgcacagaataagacttccagtggacttttgcttgatacctggggagaaaattgtgcttttccaagtaagatgagtcatctgagatctgccatttctgggaattgtacagggacccagagtcttagggatctgctctgcctactttgtggaatttattctcacagtgcatgagttggtcactttcacactgctccaggcaccaggagttggaagctggaagctctattctctggaacatcaggcattagattttagtgtgaaggcctcaggaattgtttctgcgctcctgccaccctgcactgtgattgggtctgttttgctatatacttcccaaattgtgtaccttatcactgggaatggcacacacatttctggggaagggtagtttagcatttttcttaagggccagaatttaaatctcatcactcctaccaagcccccagcccctcccaccaagcccccagcccctccccacccctaagacatttcttctcctgcaagccagagaaacaatgagaaaagacacagaatatttgggagatgaggcttcccaaaggactgctgcaatcatggtggagctgatacaaccctctccccgcccaattttttattttcatttctaccaactgtagattatgcatacacacaagcagatcacacaaaagaatactatgcctcagggctaggaggattcattgagcaaagcttggaaggaagaactagagagaaacctagagacagagaccctcgggagaaataattaaggctggcagggaaaggctgtgttaattgagctgagaagaaagatgagcatccggggattctcgtaagaggtggtggaatttgcagataaagtcattggtacattattggattcatctttggttactactttttaaaaatgttttttggggaagaatgctatctagaaaaaaattcatgcaagagaaacagatagctacagaactaaatagtaataactgaccaaaaaaaaaagtgagacagagggtgattttgccatatcctcatttcctggactgagcaagagaggaagcgaaatgctgagtcggctcctggcgtagcggctgccattcatgtgccgttgatccaggcctggcactgcgagagcaatacccattggtttgcacagaactccctcccaccagccccacctgccctcaaatagtcatcccacgtggttgtctctacctaaatttcccaacatgtttctttttgagtatgaggatcttcttttttaagtcaaaaaataaaaataaaaaaggtcacatgccccatgagaccataattgtactttccgccaagaaaatataatatataaagaccttcaagccattaggtattaatatgacttttttatttttaaatatttttgttgtctaatataatgcagaaaattgcatacagcataatacatgcacaacttaataaactgctgtagtgtgaactgccacatatccatcaccaggttggaaaatagaacattgctggtatcccaggaacttcctcgagccccttcctcatcacagccccctcccttggaaaccactccctgatgtcatcatttccttgcttgcttttctttatggcttaaccaccaatgtgtgggtccccaaacaagatagttttgctatgaatggaaccatagttcatatactttcttgtgacttgcttcttctcaatattatgttcagaagatccatgcatgtggttgcatgtaacttgtagtttgttttccttcctgcataataattctttgttgtaatatatcacagttaattgttttgtccattctattgttgatggatattgttgcttctggtctgaggctatcaagagtgctgctattcttttgttgttgttttttttttttgacatggagtctcagtttgtcacacaggctggagtgcaatggcgcgaccttggcttactgcaacctccgcctcttgggttcaagtgattctcctgcctcaggctcccaagtagctgggactacaggcacccgccaccacacccagcaaattttttttttttttttttagacggagtctcgctctgtggccaggctggggtgcaatggcacgaccttggctcactgcaacctccacctcccgggttcaagcgattctcctgcctcagcctcccaagtagctgggactacaggcatgcgccaccacccctggctaatttttctattattggtagagacaggtttcaccatgttggccaggatagtcttgatctcttgacctcgtaatctgcccgcctcagcctcccaaagtgctggcattacaggtgtgagccaccgcgccccaccctgttattttgaaagttagagaactgccatggggaaattcatttatcctttcaagagataagaatgggacataagatattgcaatttgttagagaaaaagaggtcaattagcaggctcttgtagtagctcatagtatgacaataggaatgttgagtagggaatatattcaaaaaacactatagagatacaatcaagagaccttggcaattgatttgacgtggaaggcaaagaagagggaggagtcacaaaggataccaagatttcaggcctggatacaggaagagaattggaagacagagaacacgcatgattgatatgaaggtgtgtaatcaatcagcattttaacttctatatttggctctctaggaagattcactcaacccacattttatgatcaaaaggacagtatccagggtgactggtcccctatgtctttgaccccattcctgcagtgttgcccccagaaactggaagcatgtcatgatgggagttttcctgggtaattgatgctgaattatcaatgggaataccaaatcagattttttaaaaagttaatttaacatttattatttttagagacctctgtcatccaggctggagtgcagtggtacaatcatagctcactgcagccttgacctcctgtgatcctcccgcttcagcctcctaagtagctaggattacagacatgtgccaccatatccagctatttttttttttttttttggtagagatgaggcctcactatgtcggccaggctggtctcaaactcctggcctcgagtgatcctcccatcccggcctcccaaagtgctgggattacagatgtgagccaccatgcctggccccatattagattttggagggactacataaatttcacgaacaagcaattctgaaaacagtggaaattattgaagtcctccttcattgcactatctctcctcttcttcgaaaagcaccttgaaattttctctttgaccaaaccacatcttcatgtgaaatcctttctgctgttttcctcctgttaaaagccctcatattcttcaaggccctactcaaatcccacatcctgagtacagctgctcccttaggctcttctgacacttctttttttttttttttttttttgagacggagtctcgctctgtcgcccaggctggagtgcagtggcgtgatctcggctcactgcaagctccgcttcccgggttcacgccattctcctgcttcagcctcctgagtcgctgggactacaggcgcccgccaccacgcccggctaattttttgtatttttagtagatgacacttcttatagtgtacttttctgggcaggttttctgttttccccagctagaccaatgcaccttggggcactccccaaggtcttacacatttttacattatcttattaagcagtgccagcctttactcttagaagctgaatgttacttatgtctttgaggaaaagacagagagttatgtctgggaccaggaatctccaaaatctcaattagcagtggattctcagataaggggaggtacagtcaagcagcttcctcacagcaaatggaccaagttgtatggaagtcgaagggactctccttgtcttcatgagaggctggccttcgtggcctgcttcctctttccctgagagccagaggagggcttttcttttctttcagtcaacaaatatttttctagcaactcccacatacccctgtgtactatcctatccactggggagaaaatggtaaataagaccgtttccagagcatatgagggacagaaacaaaagcacaacagatgagcatgccacactattccatgtcacattaaatgctgtggctaaaacatgtgagaagctagaaatagaatgatgctgctgggggccttctttggcagagatggttagagaaggcctcttggaaggtgtggcctcaatgacaaaggagcttgctctgcacagagagaggagaaaccattcccagaagtcggcaaggcacagcggggagaaacaggatgggtttgggtaaggaggtatcaggagtttggggttctaaagcacagcatgaaatcctaaagaggatggaaaggttggcggggccagattctggaaggcgtcatgtaatggggtgaggagttatgactcatcctttaggagataggaaacctttgaagggttttttgttgttttttttttttttttttttttttttgagacggagtctcgctctttagcccaggccggactgcagtggcacagtctcggctcactacaagctccgtctcccaggttcacaccattctcctgcctcagcctcccgagtagctgggactacaggcgcccaccaccacacccagctaattttttgtatttttagtagagatgaggtttcaccgtgttagccaggatggtctccatctcctgacctcgtgatccgcccgcctcggcctcccaaagtgctgggattacaggcttgagccaccgcgcccggcctctttgaagggttttaagcaaagaagtcacatggtcaaatctaagctttgaacagagctcctcgatcgctatatctactgaaaggcaagacagttttgtgctatcgaagtaagagcctttcttgctgaggacatagtttcttggtgagtttcactgttaaggccaatctaaaatgtccctccacgttctctccaaaccttatgtttcttcacgtgcactctgtacctcacctctgcatcttccatgagcccctcacaccaaaccaggatccacccttccagacccatagctcttgacctggtttgtcttttccatcccaaagtaaaactaagtaccaactctttaaaactattatgttttaattcctccagctttaagcagcctggcctgttctcaacccacatatcattttggctaggggagaagtctagttctttccgcccacaaggctgtgtgtgtatctaagtgtgtgtattaatactagtaactttgcatgttttgtaaaccttgctttttgtgatatctcctgcatatcagaatgttgttttctgactttcacactattcgcagccgtagtaacagggcaatggtgcaacgaagaaaagaaagaggctgggtaccgcggctcacgcctgtaatcccagcactttgggaggccgaggcaggtggatcacctgaggtcaggagttcaagaccagcctggccaacatgatgaaacccatctctactaaaaatgcaaaaattagccggtcgtggtggcaggcacctgtaatcccagctactcgggaggctgaggcacaagcatcacttgaatcgggaggcggaggttgcagtgagctgagatcatgccacttgcctaggcaacaaagtgagactctgtctcaaaaaaaaaaaaaaaaaaaaaaaagagaaagcagagaaggtgttatgctctagtgacagggaggacctgtatttggggaagagtagaaagatctggattccaagccagggtcaaccattcaattgctgtatgaacaagtacttaattttagtttccctgttttcaaagtgagaataataatggcatatgccacaaatgttggcagagattaaatgagaaaaatagatgtgaaacatttagtgcagtgcactaagaggtgctcaataaatgttgattaatactagctattgtcactggttatcaatcaaaagacatttgttactgctgagtaaaaccatactgggcgcaaaggggctcgcagagaaagtagaaaaggtaagtttgaacctttaggaagcatttgatctactagagaagtaagaagtatatacttcacctgagaaacagcccaaggcagcataagtggggtagggaggtgcagaccagatacatggattcataagggccgaagaggttgagacctcttcggtctcaacccatgagaatgagattctcatggggtggggttaatcaagcacagttttatggagggagtgaatcttgagcctggatgtgaaagtagtttaatatctggattgctgcagagcagaggagaatgcttccttgggaagaggatcagaatgaggtcttgggggaaaagtggggtttgttctaggagtagaaggacattggaaaaggagacttcatgttgggaaattcaggaaaacaatgagaggtaagatgaggccacattggaaataaagaactgggaaccactatacgttttcaaataggggaatattatgatgtaaaattagtattttagggaaaactggtattgtgtctatgtgcacttgtgagtgagaccacgaagaactactctggtgttcagatgccagaagggtgagtactcacctggaaattgggaaggaaatgagtgaacctgatgtacattttaggaggtatttgtctattgtgctgaggtccataaacagtctttctctacagtacgagaaatgagtggccaaagggagagaagccacaggactccagctagcaaggcctgctcctcctccacctgcccctcccctgtcccatggaaatcatccagtctgaggcccctccttcaacagcaatgcagccaggagttcacaaagggaagcatttcctttccaaagactgctaagatggtttaccctgttatgccaggaatgttaacaaaattgcaaatgtacttttattcttttgttttttctcttttttttgagacggagtctcactttgtcacacaggctggagtgcagtggtgcaatctcggctcactgcaagctccacttcccaggttcaagcgattctcctgcctcagcctcccaagtatctggaattacaggcacccatcaccacgcccagctaatttttgtatttttagtagagataggtgttgccatgttggccaggctggtctcaaactcctgacctcaagtgatccacctgcctcagcctcccgaagcgctaggattacaggcatgagccaccgcaccctgcctgttttttttctctctctttttttttttttttttgaggcagggtctcaatctgtcacccacgctgaagtgcaatagcacaatcacgactcactacagccttgaactcctgggctcaagcgatcctctggcctcagcctcccaggcaccaccatgctcggctaactttagatttttttgtagagacagggtctcactgtgttgcctaggctggtcttgaactcctgggctcaagcaagcctcccacctcagcctctcaaagtgctgggattataggtgtgagctactgcacctggccacaagtgtatttttttttttttgagacagagtttcactcttgttgcccaggctggagtgcaatggcgcagtctcagctcactgcaacctccacctcccgagttcaagcaattctcctgcctcagcctcccgagtagctgggattacaggtatgtgccaccgtgcctggctaattttgtatttttagtagagacagggtttctccatgttgatcaggctggtctcgaactcctgacctcgggtaatccacctgcctcggcctcgcaaagtgctgggattacaggcgtgagccactactccaggccaagtgtatttttttttttttcagacggagtctcactctatcgcccaggctggagtgcagtggcacgatcttgacccactgcacgctccgcctcccaggttcacgccattctcctgcctcagcctcctgagtagctgggactacaggcgcccgccaccacactgggctaatttttttgtattttcagtagagacggggtttcaccgtgttagccaggatggtctcgatctcctgacctcatgatctgcccgcctcggcctcccaaagtgctggggttacagttgtgagccactgcgcccggccgccaaatgtatttttaaattacacattctatagctccccactgggtgaccaagtaagagtgcttttcttttctttcagtcaacaaatatttttctagcaactcccacatacccctgtgtactatcctatccactggggagaaaaatggtaaataagaccgtttccagagcatatgagggaaagaaacaaaaccacaacagatgagcacgccacactattccatggcacattaaatgctgcggctaaaacatgcaagaagctagaagtagaataatggcgatgggggccttctctgggagggatggtcagggaaggcatcttggaaggtgtggcctcagtgacaaaggaggcctgctcagcacccttgaagaggtccccacctaggctcgtggctatttctggacaggtttctggatgtgacggtgcctgtctgaggagaggggcagatgtgggaggtggctccatttcctgcaggagtcttgagatgcttgagtccctgggtgctggggaagtcagttctagatatcagtgggtttgtgtgaatggctaatgacctgaaatcaacccctcatcctgtggggcagagatgttgtttcaggcactgctctgaagtatggtggaaagcacagagttgcttggggtctcagctttacctgtcccggtctctctttttggtctcttaactctaggctggatggacatggccccttaaggaaatgaaagtgagtgactgagtcctagcagaaaaaggaggagatcttggagttcctgtcttccaacacgcacctctttggttgtgatggtgaagtgggacagtgccatctcagcagggaccttggatgtgctctagagggggtcttggaggtgtagcatcgttacatcccctcccaccatcctgcctacacagtggttttgggggcacagatatttcagagagtagtcttcccaagaaccctacatcaagtatgctaccaccccttcccattcttgattctggtcccctctttattttcctcatagtattcactggacctaacttatgatacatttgtttgttcactgccatgtctctggcacttagagcagtaactggcacatattaggcacccagggtgtaattcatttgattaatgaatgtattgaatggctgcatggatgaatgaagaggaggaacagagcagatgtctgaccagctcattctggcttctggaaggatcctgattgggaattttgcatctttccctccccacagcctcctagtcactactactaaagaatagagaccctgactcccacttttttttttttttgagatggagtcttgctctgtcacccggctggagtgcagttgtgctatcttggctcactgcaacctccacctcccaggttcaagcgattctcctgcctcagcctcccaagtagctgcgactgcaggcatgtgccaccacatctggctaatttttatacttttttattacaggtgagctttcaccatgttggccgggctggtctcgaactcctgacctcaggtgatctgcccaccttggccccccgaagagccccgcattcttaactactgtgtttggtatgtttgaattgacacttgcctcttaggaaggggaatctttttagaccctggggaaatctgtagttattgcaaaggccttttcctgcctgttgggcatttaccagatctttcttcctacacaaggagagcctcccctggttgaatcctgctataaatctcactagtgacccacaaacaggggtcccaatgtgacctgctcattaacacaaaaccgtcagcccccatacagcttcctgccttcccagtcgggttgaggcaagaaatttccattctgcccatgctgatgaaaccagtcgccagcatttacctttctaaggggtcctttctcctcccaccccagcccaccccagcacaagaatgtaagagagggcaaacagctgcctggcttcagttctatggccactcaagaattggctcgcatctgtctgccaggacagagagcgtcctgagggggctggtgtgtgtgttgtgtgtgtgtgtgtgcacgcgcgcgtgcatatgtgtgtatgggggagttcagtttcaggtaccacacatctggaagtcagagaaagaagccactgcacatgttagagccattttggggggcaatttttaaaaaaaaaaacatttttaatgggctgagagccgcctcgtggaaagcccggggcgggggatggagtagaaacagctgcgggagtgattcttgtctccatatatgtttataaggcactgagggcgggattagcagctcctgggaagtctggctctagttaccgtgtcagcctgtcctgggggcagtcacagccacagtgaccattagcaggcacccaggcctgtctttggctcggaaacggtggcccccaatgtagcctagtttgaacctaggaactgcaggaccagagagattccactggagcctgatggacgggtgacagaggtgagaggcactggtgtgagggacaagtgtcacaggcggggaggaagaactccgctatctggtggtggaaatgtgtgaggatcaaagtccccagggagagtaggtgttgcgggcggcagggtggtgggctgggcacgggctgggcataggctgggcaggaggcttcggggccgcggggaggaggctggagaagcaggagggcacgggcggccctagctctgcaaccccgggaaggactggtaggtggagttaaggatatttggacaaggaaacgctttgaagcttttctctcgtcctccctactcgggacctggtcgcctcccctccataaaaccattagctcctggtgccagccctatctctgctccatctctcgtggttccagccggtgcattcacagaccttctgccccgggggacgaggaggatttatggggggagaggagagggggaggggcatcctccagaggagggggggtctgaggggagtcgggcgtggaagctgttagtcccgggctgggggccggctcacttccgagctggctctgcatgacaaaggggaaggagcaagtgtcttctttgatctgccccctgccggccccacacacctgcctgttggtgcccccgccccagccgaggcttcgagaaggaaaatcaaaagggggcttggggaagggctgtgtcccagctctcctggaccctgctcgggccactgtcctctcctggcggccccaggacaaaaatacttcccgggctgatgacccgaagcacccgccgccccctcccggggagcctggggacgccgacgcgcgagagtggcgcagtgagccggggcgcgcggggctgcgctcgtcaggtccggggccccggggaggccgctgggggcgcgggtcacgcccagacgggggccccggaggaccgcgggggagccgcaggggccgtgtgtcccgaggcgcaggctcgctctagcagcactgacctgctgcgggtcccagggcctggggacaggggctctcgggggcggatagaggaacaggcgtgggttacagcaggcaggaggccaagaggcgggaggcccgggagccagcagggaagggctgtggcatctggaagatgcgtcctcagctcaggcatttgatgccagagctgccgcctggcgtcggcagtgtccccggtgcagctgctgggcaaggtactcggtgccgccctcgaggaccacggtgccgggaggggcaggggccgcctagggaggcaccacctcagccgccagagctttccgggcgggcggttcgcggcgtggcttgtacatttctcagagaagctgccttgagaaagtgaaaagtccttgatctgtacgcaggggttgggacttaggaaacccgctgagggtgagaagggcgcagatggagaggggagactcctccctgggtgcaggtaaatccaattcaccaaaatgttttaatcctacaaaggagagcctgagggtcagagaaataagtctctgggctggaatgagaggtaggcacgtgggggagtggataggatgggccccatttctttggatgttctgcagcaaggacaggtatgctttacaacagccgaagtggcctcccggctgccgaacggaggaacgccgcaagctccgctcttgaaattacttgttttcatttctctttgtggtttctcagctcattatttctttggaaattaggtcctgtgcagggttcccacagtttggggtaagagacagaagtcctagggtgggaagatgagcagtgggaggcggaggctggaaagaggccgagcttctttgtggggaacacgcagcacgtaagcatcagtgcaactttctccgcctcaccccggctcctggtctgcccttatccgctgagtttccacactgactctccatttctgttttctccagggaaccctactctggaaactgtcagtcccagggcactggggagggctgaggccgaccatgcccagcctgctgctgctgttcacggctgctctgctgtccagctgggctcagcttctgacagacgccaactcctggtggtgagtaagaggggctgaggtcctgcctgcacagccggaggcctccttcagcgactgagatgaggaggaagggcaccgtgtgtcacggtagtaccttgattcctgggagtactaagggcctcttttatcccaggaaaactaagaacgctctgtgtctctctcaacccttatctttgtaagggttccctgaggataaaggttccgttcatttgatttttttctctaatcctgtccacattccttttccttggaccttccctcatgcccatgaattgttagaaattgctcttgggtcaacaagaatatcaatacttggtagttttttgttcctttgttttgtgtgttttgctggtaggatatagaattcctcttttataagtctgaaggccagatgaggggttcacagcaccatgggtggctggctttcttcttatgttttaagggctgttgtcattgccaagttgacagggaaatggcaggcgatcaccacctattttgcatggtctctgccactagcatttttactcagatagcaaatctgcagccttctcatctaacactctatatggctggtagatgatgagcaaaagggagagcctctgaactggtggagagtggatgaggggaagctcaaagtgagacatggcagtgaaaacaagtagactagatcgtgatgtatgtaaagtgattggattttaaaggcccaaagggagtaccacgcaaaggattgattgctttccatggcttatcatgtacttgggctgcactgaactagtcactcctactcattgaatgaggcctgtgctctcctgttgaggtttggctctttttgccctctattaaaatgaagagctgctccccacccctcgtcttcttatctgcctgacccccattcttaagatccagttcaaattctggccatttccttataaaggcttctcttcagccataagggctattttcctatctgatcacagcagatccagaagcatatccagagtctgtctggggcatttggcatctcgcatgtcctttgtgttcatgcctcagattccttcagtttgtcctttgaaggccagcactctgatttactaatttttctttccagggccttgtacacagggacgcattcaataaatgtgttgaatgaatgacttaatgctgcacacaggcgtatgctcactcctgggcctttttttcccctttctggattgctgtcctaggtcattagctttgaacccggtgcagagacccgagatgtttatcatcggtgcccagcccgtgtgcagtcagcttcccgggctctcccctggccagaggaagctgtgccaattgtaccaggagcacatggcctacataggggagggagccaagactggcatcaaggaatgccagcaccagttccggcagcggcggtggaattgcagcacagcggacaacgcatctgtctttgggagagtcatgcagataggtaagaggccattacaagagggctcggccaaggaactgcactcgtctcgtttgggagcaattaagctctctcaggactggcacagggagagcccaaaggcagcctaagtgggctctctctaggcttggcagcagtgtgcaccacgagagaggcacacgaggaagcaggctctgggaggctgcagaaaccacacgcttgatgttcctctagctctctgccttccagcctcacttggggcaggttgcttgggactcactgagagggggcaggttgcttgggactcactgagagggggcaggacatctgagttgacttagagtggattaggagagccgcccaccgccactgcctttgtgtctcagtgcaaaaaagagccttgggtagagaaccagaaattgcagccctgaatgtctgttggatttttgcctcttccacttcaacctttgacagagagatagaaatgtcggccaaagtgttgatagctgtcactaacccaaccccatccagtcccagctttttcttttgaaagagatgtgtgaacatgggggaaggggtcagacgaaagaaaagatgagagggagagggccaagtcttctggattcctgtcccttcccctctcccactgctggccaaggattcttgggccaccctattgcttagatggaggtgtgatctgaggtctaattgttttaggtccttttgaaatgcaatcctctcctctctggcaagaaattgagaaatccggccctattctactgggtcttatccccagggccataaaagggaagtgttagaatgctgtgttccttctgcctgacattctcccagaacacctcccttcaaaaggttacctgaggctggagtttccccagagagggatttcagcctgggaggggagttggggaggtagagatttcttcgtgctcctctcttagggaggatacttggaaggctccttccccctcccacttattccagacctctttccctaccctctctgtcccatattgagaagtaatgcccaatgcagtagctcacgcctgtaatcccagcaccttgggaggctgaggcaggaggattccttgaggccaggagttcaagaccagcctgggtaacatagtgagacctctgtctctataaaaaaaattttttttttctaaagagagagagggaattaaagatgggaaaagtacacattgaaacttgctgctctcttgcttccttcggtatcaactcagggtgcataaaaggaaggtcctagtgttcctggggcagctttcccaaaagagtagacttggggttttagtgggatttactcatagtttattgattcttctcaaacccacctggcacttgtctcttctttctggcgaaaatcttggcagcacttcctgccctgcgttttgggcaatgaaactaggacggcccaggtgcagagtctcctctaatctcttcagtggagttaatgtttattgaagacctaaagtaggcctgatgttggctagatccttttcatgtgtatttcgtgtgcataaaggccccaaagtgaggctgtactttaggaaagaaaggggttggcaggaaaagacactccgctgggttcagatgtgcactaggtggccagcgaaagcaaaccctgtcgaagagagcccatctctctgtgccctattccgttacaaaatggaacccttctgtttgcctaattttcccccttcctttttatagcatcactgaaggctcatgctacctaggaggctgtcctcccttcctcccccctgagcccagagtagctcctggtgagtcctccctctccctatcttgagaaggaccgtctaaggcttcctttctcctttgaagctgctgcaaaagtcggtcaccagagggcggcagagcagctcggaggagcctcggcccgttgcccagcttctgcctagggagtttggaggcaacttgggctgctatggaacagagagggcatgaaattgttctgctgtctcctgtagggaaaagacgcatgtccctctagtagctcacggctgcttttttttagccgtttattcttgagatggttagagattcaacctgaactgttgcgtatatagataaacccccacgttgcttatccattctgaagccccgaattatctctttcttgctgaaggtagcaacagtagatggtacttagtaggcttacccaagggcccaaaggctgccccgtgaaggcagagctgcccacactcagcttctgatgaagacccgactgaaagaggcaggcagcgcaccggaggacaaatcaggatcccaaacagtcatgataggttcgaactgtcagagtacagaacgtctggtgtgttagttcagctgcaggtacgtgattttagaaggcaattctgagaaggctgattcaactctgaaaagcatgtttgctaaagaatgatagaaataaatcagacatatgtagcttggaaaagtgaaaacgtaaaaggcttaatagttgttttcaaacactgaagagctgtcaaatgggaaagggattatagcagagtgcaagtgcagcaggcaggaatcataaggaggcgtatttcagcttaatacaagaaggagcattctggtgattggagtcatttgaaaaagatggaatggattgctttgaaaacctagcccactggtctgaggaactgtgtagagggaaagcttccggtggctatggagggtagctcggggctgaagcttgggaggctccctccgttccaggatgccatgtcaggtggttgaggctgcattttaaggagatgaattcctcaaagtggggcccagaccctcctccctgagaggctctttggccatcttaccatccccagtgctccttgtcacattctgagccccgtagaccgggtcctgtcggctgaatcatgagtgtaacttcctgccatcatttcggtttttcttgggctattcctatttcacaactgaccagaagccagccactggttaatagagaaaaacggactcactcagcatggtctgtttgtaaacttcactgtgtcatgcccagataatcaagaagtagggccaagggagagatttctctagacctctcggttgattgcagactgcttccctttctaccttccaagacaagactctgggattctgcctggtttaatctctgagatcaggattgaatctgtttcctgctaagaatcactcccttctctccatatctaagtccctataagtatcatttgttatttcttataacagctttattgagatacataactcccataccatgaaattcagcattttaaagtgtaaattcagtggctttgagcatattcacaaggctgtgcaactatcagcactgtctaatcccataacattttcaccgctccacagagaaactgcacacccgttaactgtcactctgcgtaccccaacccccaaccctaggcgaccactattctttctgtctccatggatttgcctatcctgggcatttcttataaatgggattatagaatacatggcctttggtgacgggctccttttacttagcacaatgatttaaaggttcatctgtgttgcagtctatatatatatatatatatatatatatatatatatatatatatacttttttttttttttttgagacagggtcttactctgctccccaggctggagtgcagtggtgtaatcatagctcattgcagcctccaactcctgggcttaaacaattcttccacctcaacctcctgagtagctgggactacaggcacatgctaccatgcccagttttgttttgttttgttttgttttgttttgagatggagttttactcttgttgcccaggctggaatgcaatggtgtgatctcggctcactgcaacctctgcctcctggggtcaaatgattcttctgtctcagcctcctgagtagctgggattacaggcgcccgcctggctagtttttgtatttttagtagagacagggtttcaccatgttggccaagcgggtctcgaactcctgacctcatgtgatccatgctccttggcctcccaaagtgctgggattacaggcatgagccaccacgcccagcttaatttttttcttttttaatgtttttgtagagatggggtactgctatgttgccaagctgttctgaaactcctggcttcaagtgatcctcctgtctcggcctcaaattgctgggattacaggtgtgagtcaccacgcctagtcactttttatggctgaataatattccattgtatggataataccacattttgattacccatttatccgctgatggatagtttggttgtttccaatttttgcctgttatgaataatgctgcaagaagcattcctatgtccatttttgtgtggacatatgttttcctttctcttgggtataaaggcatactttcgagatattgtgggtttgcagatttggttccaccgtactgcaataatactgcaataatgtgaataggcaataaagtgagttgcatggttttccagtgcatataaaagttatgctgcgggccgggcgcggtggctcacgcctgaaatcccagcactttgggaggcccaggcgggcggatcacgaggtcaggagttcaagaccagcctggccaagatggtgaaacctcgtctctactaaacatacaaaaaaaaaaaaaaaaaaactagccaggcgcggtggcaggtgcctgtaatcccagctactcgggaggctgaggcaggagaattgtttgaactcgggcagcagaggttgcagtgagctgagatcgtgccactgcactctggcctgggtgacagactgagactctgtctcaaaaaaaaaaaaaagttatgtttacactattctatagtctattaagtgtgtaataacattacatcttaaaaaaagtacatcccttaattaaaaatactttattgctaaaaaatgctgacacagaaacacaaagtaagtacatgctgttggaaaagtagcacggatagatttgtagcagggttgccacaaaccttcaatttgtaaaaaacgcaacaccggccaggcacggtggctcacgcctctaatcccagcactttgggaggcccaggcgggcggatcacgaggtcaggagatcgagaccatcctggctaacacggtgaaaccccatctccactaaaaacacaaaaaattagctgggcgcagtggtgtgcctttgtagtcccatataccggaggctgagacaggagaatggcgtgaacccgtgaggcggagcttgcggtgagccgagattgtgctactgcactccagcctgggtgacagagcgagactctctctcaaaaacaaacaaacaaacaaacaaaaaaacacaacacctgcacagcacaagaaagctgagcatagtaaaacgaggagctttgcctgtgttcttaggagtggaattgctgtgtcatatgggaactctacgtttaaccttgtgactgttagccttagactgccagactgttttccaaagcagctgcaccgcttaaccattcccacccacagtatgggagggttctggtttttccgtgttctcaccaagttgttattggctgtctttttgatgatagccatcccagtggaggtgatttgggcttgcatgtccctgatagctgagtattctgaaacagacattttactgaaatagaacatacattatatgaatgttgaggtggttcaccacagcagtaaaggggaacatagttgggattttctgctggaaaatgatctgcgtatttagagggaccgtgatgagtgtctggaattgtaggtgctgtagatgttgttcccagggctcctgagttaggaggcagtgtggatcctgtggaagagagaggaagacagcttggatttttctagacattgtaattctagttcatttttgactcctggcctctgccactgtctagctagataatggcagcagtaccgacagacagatgtgcagctcatagagcgtgagaaatggcatctgtgagggagacatttctgctaggatacaacgtcctactcttgataccatgatttcttccttagcctcattctgttcgactcccatgttctgtgtgtttctgaatgcctattctcccctccgctgaggtctcccgcctaggaatctgcaggtcacacaggctcttctgcagtggatattaatgcaggccaggaccggagggacttgtttttttgtgtttttttttcttttttttgagacagagtctcactctgtcgcccaggctggagtgcagtggcgcggtctcagctccctgcaagctccgcctcccgggttcacgccattctcctgcctcagcctcccgagtagctgggactacaggcgcccgccaccacgcccggctaattttttgtatttttagttgagacgaaggtttcaccgtgttggccaggctggtctcgatctcctgacctcgtggtccgcccgccccggcctcccaaagggctgggattacgggctgagccaccgcgccgggccagggacttgttttcttccgggtggtttcgcagggctgagctggggcccagcggcggaagtaaaacagcagatttcagcccattataaagagacgtttccaagcgttagagctacgggaagcgaagccccctgccccaggggtgtcagcagagccgtggcgtgcgggtccgtcgggggagacggggggaaggacaggtccccgggagaggagagcgcacccgcttaccgccctggcctcattctgcaggcagccgagagaccgccttcacccacgcggtgagcgccgcgggcgtggtcaacgccatcagccgggcctgctgcgagggcgagctctccacctgcggctgcagccggacggcgcggcccaaggacctgccccgggactggctgtggggcggctgtggggacaacgtggagtacggctaccgcttcgccaaggagtttgtggatgcccgggagcgagagaagaactttgccaaaggatcagaggagcagggccgggtgctcatgaacctgcaaaacaacgaggccggtcgcagggtaagctgggcctccccggcctccccagcactgcagacctagggggctgttcccgggctgtgccaccagccgtggcctggccttcaaggaaacgggttagtctgaccgtgaagattcttacctacgattgcaaatttacatgtccacgttattgaacaaatccttttcaaaatgccccacttcccaatgggcatacgtgctttttcttttcttttcttcttttctttttacttactttattatttcacggttcctagaggacttaggtgcaatgtttggatcagaattccagacgtaaggattagagcagcgctcttgtcttggccacccctcctttgcaacttgaatagataatgcgatgggatgtttaggccgttagacctcatctagggtttatgctctgttaaaggctctggtaatagcagagtcgactttcaagaactgctgtcatacgtatccagaacccagtcaaaaaacacattcaaatactaatgacaaacacacttctgagctaggagattttagacataagtggaagtgtgagaagacagccatctgtttaaggctggaggaaacagcctccccagtctcatgtaatgtgactgtcttttaagcctcagtttcagcagaagcaaccatgcaggtttgaggggagctgggttcattgtatgtgcagagcacacctgggcggcagcttctgggcccctaggtggcatgctggaaagcgtgaaccctctctgcctgcaccttgttcctgaaaaccccccctctgagcacacatccagcctcctcttttctttgctgtcccccatcgtggctgcctctgccacacaagactggagggcctgccccgcaggaatctctgccttttgctgcttctgcatagccagtgttgacagggaccgagggcaacatgggcgtccacccgggtttcctctgagaaaggtctgcggtctgagcactgggtggtgagaggctctttctcctggaaaaagagctctcaggaaacagcacggacttctttcttggagtgttgtccccactcgggtctatgtcaagccagctggctctggttcccaggcgaggtaatgtaacaaagatgaactcactcaaaaatgagaatggtggccgggagcagtggctcatgcctgtaatcccagcgctttgggaggccaaggcaggtggatcacttgaggccaggagttcgagaccagcctgaccaacatggtgaaaccctgtctctactaaaaatacaaaaaattagctggacttggtggcaggcacctgtaatcccagctacttgggaggctgaggcaggagaattgcttgaacctgggaggcggaggctgcagtgagcctagatcacaccattgcactccagcctgggcaacagagcaagactccatctcaaaaaaaaaaaaaaaatgagaatggcaatttcttagaagtttaacggtggcaccctggtgattcagtaacaggatatgaatataagcctcaaaatgtctttacatagcaaaatcttaaaatgtgaactcatgagaggcggggcacggtggctgatgcctgtaatcccaacactttgggaggctgaggcgggtggatcacctgaggtcaggagttcaagaccaggctggccaacatggtgaaaccccatctctagtaaaaatacaaaaagttagctggacgtggtggcacacgcttgtaatcccagctacttgggaggccgaggcaggagaattgcttgagccagaggttgcagtgagccaagatcctgccattgcactccagcctgggcaacagagcgagactctgtctcagaaaaaaatagaaagaaaaaagaaaagaaaaaaaatgtgaactcatatattggagcacatatcaaagaaatggaataggaagtgtcttttgtctgaatggggatgttgtagtattggccggatggaatgtggtgcacctgtgtgcatagcatcatcagccatgggacatcaggtggagaccagagtgggttatatgcccagggtcttccttacgcttcccctatccagaggctatttttgtttcccagaaaagggtgtgtgtaaggtggggtcagtgcgtggtgatgttaggagttctggcaattgctgatctgtgattatgataggctaacccagggcagagagcctggagccatctcagatgacttctgctcagggcgtgtgtggagccacccggtctctcaggtgtcttggctgtctcccagtctatttgcccacgtctttgggtgtctgggcctgaggagtagagatgtcaatgaaggggttaagatccgcactttatctcctgactgcccagagtcgatccagtttttgaaatcttagttgaaacactgccctccccagtccccattgttagtagtttttctcccacctgatcttcaatcgggcattcttgctcttctcaggtattccttactctatctacctttgccttggtaggttggcggtaggttcctgtgggcagggattgccctctctgcccctttgcttcaaccctgtatgtgctgtatgtgggtgggacaaatggatatacacagaggagttccgtgttgcctcctcgggagaggtcagattcacggaggctgcttgtggctctgctgagctgcgctgtggtgtctgcacgtgcctgtgatcaggcaggtgacacccactcttcccctttcccctgctgctgggtctcactttattgcccttaattgtttgttgtcttgtccgggctgttatctggcagccttccctcccatcaggcttgttcctggcttgctcaccttccctgtctgtctccccgcttagccccttccttcaggccccacacctctcctcttccttaactccttatctctccctttgcctctgcctgcttcaggttgggaattcctggccccctttattttttatcctctctccaaggaacaggcctcggccatcagtcaccatctgaggccagaggtattcactgcttgcctcctcacacctacacacaaagttctccagcaaggactgagtgatggctgggatggaaaatagacaagtattttagaaccatattaaaaagaaaaaaagattatccaggatctgatgtcttgacacagagtaaatcttaggctactttgccagaagtttctcttggcctgcaagagcatctagtagctccttcttagacggtggcggcaacaccagtggctgatggtgttttgccactcaaggatttctaagcattttccagataaaagcctggtgcctaatcctgtaacattcctgtctgtcaccaggctcagcacaccattagatagaagtggaagaggagctgagaggcgcttttccagggacagatcgtagaactaaaacttttttctttttttttgagacggagtttcgctcttgttgcccaggctggagtgcaatggcgcgatctcggctcactgcaaacctctgcttcccaggttcaagcgattcttctgcctcagcctccctagtagctgggattacaagcatgtgccaccacgcctgggctaattttgcatttttagtagagacggggtttctccatgttggtcaggctggtcttgaactcccgacctcaggtgatccgcccgccttggcctcctaaagtgctgggattacaggcataagccaccatgcccggcgaactaaaacatttttgaaagctttttttttttttttttttgctttttgaattagcagtctgggctgaaaatcggcatttccccctatcgcctacaaaaggagcctatatatatatatatatatctacaaaaggagattttgtatatatacatatatatatataaaatcagtagtaaaatatgaaaaaaattgcagatattcctatctctacaatgtctttgaattcagggaaggatggagggggtgtttaagctggtgcacttcctcttggatttgttttcctaaaattctggtccttgccctgcagggtcttgctccgactctccttccccaactctgtctgagtgtttgcccctgcaagagatgcttatccgtgctccgagttgctaagtggcaaagtgcacagtttccaacccttaatgtttcctcctctcagcagtgccagacgcctgtcatccatctctaagccaaggaccatttccagaggaatgtcaggctgcagctcagacccagggcatttgggatggaagggtcattgcaggccccatctttgaagtgtctgtcaggatggggtgtcagttcctttatgtcttggacctggagctgcccggctaagtgctggtgcctttaaccttggggagagccttccttcctcctctgctctaagccagctttaagccccgagattggagtggataagtgcttgttattctgagtcctttctgggtggccttggaggttagtgagcctctctagagcttcagtttctccaccataaaatagtgggaataattccgtaccagaaaaaactcaggaagacttttgccaacagtcatatgcactgatgatggctgtgctgtctcttgcacctgcagtggtctctgcttagctctgaataaagacacaatctgggggctcttgaaaagaaatctaagagaaacccttgaaaaatgagtcctgactcagttggtgacaatagccatgcataagaaaatgctctgcagccggcttgcgttttcatcccgccatctgcacgtctaggcctgctgccagggttggttgccatggtgcgtcagcatgctgccgttgaaaagcactctgtaagcagctttctggtctgctcttgcttttacattttgatttgggataactcaagttcaaatctactccacgttgtggcggttctgtgacttctggggtagacttgttttagatgaaccgctcctgcaggcaggcccagctgcttgcagttcccttgcacgttgcttcactgtgttactccagctctcccaagggggcgtctgggggctgctcgggaggaagacggtggtcttgctcacaaatggatggtgtatggcaagactcctgatgactctatggagttagtgactacatggtaacatggggaaagggaccatttaattctcagggtatttgacaggatcagggagagttttgggctaaccacggctatgccagtgatttctgtgataggcttgtgatacaattggattcttttttctgacttgtgctcctattacgcaaaagctggacacattttgttattttgttttgttttgctttgtttctagagatggagtcttgccctgttgcccaggctggagtgcagtggcacaagcatagcttgctgcatcctcaaattcctgggctcaagtgatcctccttcctcagcctccccagtagctgggactacaggcaccagccacagtgcctggctgtattttgttggttattatttatttgtttgaggctttgatcaagatggagatatctttgttttccgattgtgaaaaggatgcattgattgtaacaggttttgaggaatgagaaaccagtagagtagaaagtgaaagtgcctggtgccatcctcccggctgatggggacaagttgccttgccgccccagggttcttttctgtggtgcctcttttatgttttccccctgagcacctgagcatcttggaaagatctttgcatgcatttgaaaagctatctatcccctaccctaccggcccctcctgtgtactaggcctgtggctaccccagccaccctctgggcctcttccaccgggatcctccttcttactgccttctttctcttcccctaggctgtgtataagatggcagacgtagcctgcaaatgccacggcgtctcggggtcctgcagcctcaagacctgctggctgcagctggccgagttccgcaaggtcggggaccggctgaaggagaagtacgacagcgcggccgccatgcgcgtcacccgcaagggccggctggagctggtcaacagccgcttcacccagcccaccccggaggacctggtctatgtggaccccagccccgactactgcctgcgcaacgagagcacgggctccctgggcacgcagggccgcctctgcaacaagacctcggagggcatggatggctgtgagctcatgtgctgcgggcgtggctacaaccagttcaagagcgtgcaggtggagcgctgccactgcaagttccactggtgctgcttcgtcaggtgtaagaagtgcacggagatcgtggaccagtacatctgtaaatagcccggagggcctgctcccggcccccctgcactctgcctcacaaaggtctatattatataaatctatataaatctattttatatttgtataagtaaatgggtgggtgctatacaat

SEQ ID NO: 5 - DNA, 71711 bp, homo sapien
aaatgctccagatcctcagtgttcaagaacctcaggaagcttcgcagtcctgcctcgtgcctgcttgaacagctggatgtgggcaggaggctgtgggagcgggccatgccagcagaatcccgccttactctggggacttactcttgtcacagcccctggtgtcctgagggtcatttcagtgtcatgtgagtattactgtggctattggaaaggatttggtacgagtttatttgagaagttaggagctttttttaaaaaaaaaaattatctttgataaatttagtagaatattttgaaagtactttttggacagtaatgaatgaacaaattgctcctgaactagaaggagggatctaaacacatcatctaagtacaacagtatgtctgaaaaatatctctgcttgtcttttatttgccctttaaagtctgtgcaaacaaatgtgaacagcctcaggactctaagaataatatttttctatggatgtgtatggacagataaacaaaaccccaagggagaaaaaacttctatttaaataaaaataaagatcccctacagctccatcctcctttgctcactgggtttgctgtatttcattttgagataaaagtagtttggatgattaacagttgaacaaaaagaaagtatttgtgtctgtctaaatctatctctatcaatgtaatctatcttatttctctaatcttatctatctgtcttatctatcgacctaactgtccatctggttttgaatattccgtattccagccataagtagtagatcttttgcatccctggggttaatggttccttgagcagacactgacactgtgccgttcgggatcccgtggggaaaacaccctcttcctcactggtcagtgataccctgtgctcacagctctactccccctcggaatctcctgtctgaagcccctgtaggactctgggatcctccgaatcggccctctccagctccaagcacactgggatccttgccgcaggaggttgctgttggcttctgcccatgctgtgggtcaggatctgcagccaacaggcgtgggagcttaggaaggcacctggtggtttctcggtaggaaaatagtgtggagtgtgtgcaatcatgtttgaggaagcgtcatgagagggtcactgtctctgtggtagtgtccttagggaaccgtctttgcctggatcctggggtcaggtttggcatgaactctgaacttcctccctccgcaggatcttcagtagaaaggtcctgtcctgaggaaatgctcagaggcacttctcttgctgaggaagcctgcctggatgtgtgtttttgtcctcatggagatgcacatgacaaattgtgtgcaatgcctcagcacagcccaacaggttttttctgtttacacttaactagcctacgacagcgggaggaaaccttaaatatttccttttcttcccacaaacgctttatctaataaaacaaaattactgcagatgaagcagggagtgatttaaatcgtcatttaaatcaaggacctgatttggtttggcctccctgggggaccttttagcttgtgctatgctgataacgtctctacagactaaaccgaccagagcagaaggcagggtggcagtgcccgtggtggggtggacagcgtgggggccggcagtgtcagtcactgagtgctgggttggcccctcactcctccatatttctgtaccagtaaaataggttgaaactgacatcgagggcagcttcaagaaggtggggagagaccacgagggcagtaatgcagaggctgtcaccctctggagctactgctcggggactgagaaggaattcagtcttgaatacatgttaacctcagttcccgctccttatctggactggctggctcccttctgcgccaagaatctgaagcccagctctgtaaagcagcaattcccaactattttccccctaaaatacacgagacgcactcccatggggcctatctagattgcaggctgcggcacagataaatcaggctgtgggttgggcgcagttcccagtaaaaccccacttctttctctcccactcaagaaagcagacctccatacgcgtaagtgggagatggtgctctgtcgccccagcccttggcgggggactcggcctgtaaaagctgccaaataaatatttactaagtgaaagatagccctgaatccacactaatttgtatttttttaaagtcattcataaactttagcattttaactattagttagtaattaatcccaataaaccggcaggattttgtgattgtgaaactgctgcaatgcgttggtcagcaggaatatttgttagcatttttatgggctcttaaagtcgtcttagctgtgttactgataaagccagccacaggctttatcagtcctgccgttggctgtcagcgctgcctggataaactcctcatccttcccgggaagaaacttctagcaatgcttaagcaggaggccagggaagagagaatcttgatactgcctgctcaccataggccctctgggggcctgccctgtgtggacagatgcttcatttcatgatcgtatacaaatcgagagcaagagtctcctagccgcgctgagcgtggggcacttgccacctcactgctgttggaactctggagttggggccaaaggatgtagcccctcctcgggggagggcagtggggtcaggtgaagattcaagagctcctctttgccttgtcatctagttgtcctattctggaggaattttaaataaggatttaaaaaaaaaaaaggacttatgtattattttaaagagcagccttgaataggcaggcatattttagtaaaaataattttttaaccctgcggtgtgaagactgccagtcaaatacagtgatggtcattatcactcacctgcccccgcccccaggctggaggaaacagagtgcagagttagaatgcttctggagcattcatggctgccgggagatgcccgagaggacgttgagggcagggcagggtgagcagggagctagctcaccttaggagtgcagagaccatcccaagcagggtctgcagacactgacttcaggtgaccaggcatggagatggcaggtgaaacaggtaagtatgccccaaaaatgatgggaaagagtgaactgggatcacttagaaatcggaagcaatacaacaaaggctaaacatatttgagtaggagttcagggtagacacgctcttggatatcaagagcataaacagaggagctaacaaaaacactgcagagaagctccatcgccccctgtagttaccccacctagcgtggctgggagaagctgatacttcttttctccgtggattcaggggcatttcccacctattttaggtatgccagtttgacacaatgaactttagacgtaacatttcataactgcgatataatttccttctgtttttaggccttgaacaaaattttctttaatgggaaagcacacattttatactgaattctaattatgttcatcttgttttttgaattatttagctacctctaatagagagtctgaaagatgattacattccacagtactaacattttcaatggccctgaaagacgtgagatgcattgctgctactattttatcaaattattgtttctaaaatgctgttttactcttctagtaggaagagtgacttttaaaacaatggatattggctgggcgtggtggctcacacctgtattcccagcactttgggaggccgaggtgggtggatcacctgagatcaggaatttgagaccagtgtggtcaacatggtgaaaccccatatctactaaaaatacaaaaattagccaggcatgatgacaggcgcctgtaattccagccacttgggaggctgaggcaggagaatacttgaacctgaaggcagaggttgcagtgagccgagatcgcgccactgcactccagcctgggtgacagagcaagacgccgtctctaaaataaaataaaacaatggatagtttgtccaacatggtatgttaaaagcgcagagaagctgaagaatgatgatgaagactaaaataacgatgataagcaaagaactaagcaggcatctgtgcagtgattcaggaggggtgtccatgaggggcggcttcggagcagctctccctgtaacttatctcacagttccctcctcctttaaggagtcagaccacggtgggctttgctttagagacatgccactgtgtgctttgttgctcgtgactatcccttcacctttctagaggtgctcgtcttcatgtaaagtcgggtgaagctttttcactcctggagaaaagctcttacaacatttttgggacaaggagcaggtgtgcctcagcgagcctgtcattatctggggagggggctccagataacacacttctacttgctttctttagggaaacgacatggtctcctcctgtaacactccccaaaagaagtatgaaagccgacataaaatacgaatatgatctttgcattaagtattaaatataataccttcaatgtagtatttgtgcttctctctatccagttctcagttgtttagggatcttctgagggcaaaccaaaaatgtcagtaaagcaaaaatatatcaataaggcatcatactgacgaaaacaaaaccagaggttttaaaaaataatctgggccgggcacggtggctcacgcctgtaatcccagcactttgggaggctgaggtgggtggatcacctgaggtcaggagttcaagaccagctatggtcaacatggtgaaaccccgtctctactaaaacacaaaaattagccgggcatgatggcgcacacctgtaatcccagctactcgagaggctgaggtgggagaatcgcttgaggggagtgggaggttgcagtgagccgagatcgcaccattgcactccagtctcggtgatagggtgagactccatttaaaaaaaaaaaaaaatgtagttatcaattttttgtttttgaccaaaagtatttcaggaactttgaagaaaggacctgaaaattattactcaggctggtatttagtttgctgacttttaactctcagagctgaacagtctaatccttgatcattccagagtgagtttaggaatttgtagtcatttcctttttactgggtatttgcatacatcactaaccagctgggattagaatgagcagtctctcgatgctgaaatggaatgatgagaactcagggccagcctgaaatgttcatcctcatcgattaatccttaatgaacactcatgcatagatgacatcaaagaaggtcctttgcaatgtacagggaagacaaaccagcttccatagtgtacattcttaaaggaaggttccaatagaccgatacacatagttaacattttgtatttttatccatgttttgccccaagattaaacattaggagtaacgtggacatttgctcagtgtcgagggaagggtcagtgcatataactaggaagaaggctatctggcagggttgggaacgtgacctcttgccctccaaagcctgggatgctgaagtgaatgcctccaatcttgcggtgtatggacacagagcgaacgctgccctctgaatacagaccagaggttagaggttaatgaatgggtgctctctccacactcaggatcccgttcaatagcggttttataaataagggcttaaatggggtcagaaaaggacctgcatattgcttccaaactctctacatctttttgaagcaatagtgttcacagatgacatccttccacctgggaagacagagatgaagctcttgtgcttggagaactggacggctactcctggctcagtgtgtctaaaaacaggaccaaatggaaaacatagtggggggggaggtccttgctgccccctattcttctctagtaatcccttaaaaaataattgcggacccaaacctctggcctccagcacattttccacttgattagaggcctttgtgaggtggggaaagggacctgcagacttgtgtattgtgctggggcctgaaatgtccagctgggattttttcccatcaaaaggggattttagtaaaaccattatcaggggcttagaggagaaaagctgttgagctgcaagtgagggggcagattagcattagcgggcttgcttctggccccagtggaggagcgggaaggtgtttgcagccacttgcacacaagttccttagtttctctgcaagttcctggcaggtgcagaggtaggaatgaatacaggagtgggaactaacaggcttgaacaatggcacagggaggctttatctctgaagtatcaagcggaaggcagcccaaatcaggaaggactgcaaggtgttgttgatacctgcttcagtgtgtagacggccgtgggactggcctcattgctgttatgtgtggccacgtcgcctggaatcccccacccacaacactcgacccctctcgacagtcttcatagacggcgacaggaaattcagaaactgggaaatggccatgctggagtcctttaatgggcgaatggacacctttagggtggggggtgggtgtgctggtagcagctaaaagagtacagaggaaggttaggaaagcagcagcagtggctgtcagcctgcaaatcagtgtccgggctgtgtggatttgcagactgagccacgggaacctcctggggagagggtttggggaaggtcccctacaagagaaacgtgcatcatcttgggattactggagccctcagctataccttcctctgcaaaacggagcacagaaactggagtcacgtggtttggatggagaatgttgaagccaatagagtaattgctgcctgaagggcccatgtgaggaatgtcggagccggcctgtcccggaaatgctttttcctatgtgtcctctgtacactgttgctctagcttcccggcagaaatggggtgtggatgaaaacaacgttggtcctgacggctgtgagcacagaactagagtgacagccacatgcctcccgtaggacattttcaggcttgcagtgctgccacctcagaggtctcagtcacaccaacatcctcacgccagcccagtggccacattcgcaagagatttgtctagagtcaaattcaaaggttgtttctgtggttacagaaagagggcctaccttcttgaaaatgaagcccagggccgggcctggtgactcacgtgtgtaatcccagcactttgggaggctgaggcgggtagatcacctgaggtcaggagttcaagacctgcctggccaacatggcaaaaccctgtctctactaaaaaatacaaaaattagccaggcatggtggcacgtgcctgtagtcccaactactcaggaggctgaggcaggagcattgcttgaacccggggagcagaagttgcagtgagctgagattgcaccactgcattccagcctgagcaacagagtgactctgtcgaaagaaaaggaaggaaggaaggaaggaaggaaggaaaggaaagaaggaaaagaaagaaaagaaaggaagaaaaggaagaaagaaagagaaagaagaaagaaaaagagaaagaaagaaagaaaaagaaaagaaaagaaagagaaagaaaacggagtccaggaaagctgttcttggaggctatgaatcaaggagcagccctcccagttcttccgaggagcagctttaggaactgctggtcctcagcgttcacacattcccctcactcagttctcattctggctcctcagccagccccgttttcttcttcttggctttgtgcagggtgatacgtgtttgcttttctttcctttacaacctgtattctctgtttggggtgccttccctgaatctgtattctttcagtgtagtcactaagaatggcatatttcagctattactttccaaaagttgcgcagggagatgttctgctttcataagaccttcacggatggtgccaggaatgaatgtaatttgccttatgcacaggccccaagtccctgaaacttttccttttttatttattctctaaccaaaaatgacgtctatattacagagcttataagctgtggctcctctagccaatacagcttggtagaagcatctgcaggggataactgcctccaccttttttcccacttctacacctgcccttcccactcacagtttgattccccgaggccaggctgttgagtaccaggagggcaagacccgaaggcctctcctgccctcagcctgtctcttcttgtgccattctacggaatctggctacattggctcagaagttatttttgtaagttctgctaccttgtcctaatgtcagttttctgtaggaggaatttaggtcacacaagcaactttacttcttcgtcagggctgttattattttcatcttcatagactctcttatattttatgaagatgtcttcatctgggcaataaagatactccttttaataaaaattaaaaaaaattaaaaaaaagatactcctaaaattttaaaatgttttttcctgaaaggctctctagaatttgtcctcacagatacacttctgatttttcttttgtaataaaaaaaactagctctttttcttgctgtttaaattgatacctccatgtatgactaaaatttttcccattttcttcctcccaaactccccagatatggcaatctaagaaggatttgtatgaagtgccctttaagaagaattagaagtttaaagagaaaaaaaaaaaagcattagaagttaatgtttgattctcttagctccaaaagcagagagctgcaaaataacacctggctctggggagtaacctcactgatattttaaaattcaatttcatcttttccaggaagtgaaattcctcatttgtcaactcttacgcctggaggaaatactttgcgggtgcgggtgaaagagaaaggaccagaggggatttgttagatgggaggaggttgtggttccccttgggaaatagcttccaactcacagacaatgctgccacctactgacaagaccaagacatgggacgtgcagacttcgtggatttctccactttctgtcttccacagtggaggacatttagttttgcattaaccatactttattgtactaccttatattggaccctaaaatcatgttcataaacttggggtaaagaaaaacacaaggtcggactcctagttttaataactccaggacaggtgtggatatgattcacagctgcttcacaatggggaaggtaaattgtgtgtaagagggttttttgttgtttttttaaagggctggggaggctgaagcaacagtccagaaggagacaataacagttttccagccctacctttcaataatgtgtagtgcttgacttttacctcttaacccacatatgcacatttttatttctaaagaaagcagttgtaggctcctgcaatctcagcactttgggaggccgagatgggaggatcacttgagcccaggagttggagaccagcctaggcagcatagcgagaccctgtctctacaaaaaaaaaataataatagtaataatgggcatggtggcacatgcctgtggtcccagctactcgggaggctgaggtgggaggattgcttgagctcaggaagtcgaggctgcagtgagatatgatcacaccgctgcacttcagcctgggtgacagagcgagaccccaactctaaaaatcaataaagcagggatgaagctgtttgctgctaaatcctgtgtcctacgttaatgagtttctgcagttccccttgtgattccattgaaaattagacccttctgtgtagggaagagagaggccagctgccttcctgggggtcatgctgttctgattgttgacatctgaccctgagcacaatggcagggcatctgtctcaagtgcacagacatcagctagggctggaagagccaatcctccatctactccaggctctggaaacttgaagaccttttctgcttcgtacaaccgtcagctgtcagctggatgaagttcagggggccacagaacttaaccatcctgcttttacagattcctgaaaactggctaaattctgtgcatctgaagtaaattaggaaaggtagaaattgtcactttcatcttgtcattttcgtgttgtttgcttaagacacacgtactggccatcttgtcgttgttgttgttcacagcagtggagttttgggcaatgaagttaaggtttaaattactgaaagcagaaatgcttgtcttccatctgagaacatgaagcatttatttgaggggcgtttgcgggcttaactgttacaatttctcccttactttactcatgtgtccaattttagcctcagtgattgttctagagattctcagaaatagcaggactaatttttttggctcctccctgtttagtgactacgtctcagaaagccttgccttgggctagaaaaaggtagcagatgtgtggccgggcgcggtggctcacgcctgtcatcccagcactttgggaggccgaggcaggcggatcacaaggtcaggagatcgagaccatcctgactaacatggtgaaaccccgtctctactaaaaatacaaaaaattagccgggcgtggtggcaggtgcctgtggtccccgctactcgggaggctgagccaggagaatggcgtgaacccgggaggcagagcttgcagtgagccaagattgtgccactgtactccagcctgggcgacagagcgagactccgtctcaaaaaaaaaaaaaaaatgtagcagacgtgtatgtaaataatgctagtttgaggccaagatttcctaaggagaaatattatgaaccttggtaggaaatatttcctcatatcctttttagatgagaaaaacaatgttttccaagccatagtaattccacattaatatttatgaaaaattaatgtggtctcaactgttttcccacagtccagttccagtgtctcagatccatgatgtaaggagtaattgttgacaccccactgtgtggtaggtctgatccttctggagtgtggattacgtaaatgggggagtaataaatataagaaggtgcctagtattaacaaattagacccttttactctttctggacaagtgggatttgtaactaaaacatctgtgaagtcaagcctttttgcccttgaatgaagagaaaatagctagagtttttgcaacttgattctactttataaaaggattgtgtggcaggtatttatagcatgtgaaatatgtgtgagttcctagctttgaagctctcatgagcatgtacttccagcattagtattctgcattactatgtgcaacaaagcagtgttttggaaactggctcaaatcctctgagagcaacaggcaacagatttgacagttagctacttcagtaccttatagaccatttaacaacatgtactagttttttggtttcctgaataaccctatataatgcttgcaaacatgtctaagtttgcataaggtagtgcatattaaatagtaataacttttagcatttggggttttttttttttttttactcctaatgaaaataatatgctttggtgtggcaccttttaagaaacttttttttaaggctgaggtagaaagatcccttgagcccagaagtccgagattgtagtgagctctgatcatgccactgcactccagcctgggcaacagagcgagactctgtctcaaaaaaaagacaaaaaataataatttttttaagagatggggttttgctgtgtcgcccaggctggtcttgaactcgtgtgttcaagtgatcctcccacctcagccgagtgagtagctgggactacagatgtgtgccgtgcctggcttggtgccacacatctctgaagagagacagggtggtgctttgcagtgcccctgtgagccgcctccatgctggtcaccttctgcattggtcattaagtctagagcagcccaggttctgacactaggttctcctctaattacctaggcaaaatcttttccactttgttaagcatcttttcccatttataaaattaaatgtaccacatctgccagatttgggaaaacaaaaatgttgagacagagaaaccgaacattgtgttatgactgagttcttccacagatcacactcacattcctgacctggtctcacttgggtttctctgctgcgccacggctgcagacccagttctcttctttgtaattgagactcatttgtttccactatcacaaatgcaagtatccttgtaagttttttataaggatataaagcatttgttccttaaacaactaaagtggccgggcgcggtggctcatgcctgtaatcccagcactttgggaggccgaggcgggcggatcacttgaggtcgggagtttgagaccagcctgaccaacatggagaaaccccgtctctaccaaagatacaaaattagccgggcgtggtggcacacgcctgtaatcccagctactcaggagactggggcaggagaatcacttgaacctgggaggcggaggttgcagggagccaagatcgtgccattgcactgcagcctggacaacaagagtgaaactccgtctccgtctcaaaaaaaaaaaaaaaaaaaaattgaagtagaagagtaatgaaataatagaaacttaagtcttctttttaaagaaaatatgtgcacttttctgggttaataaatagcaggcagaggaattccacttcgattgttttattgggagtgggggtttaacataccccactctggtgctgctcagttaagatctcaagcttactttcttttgcacctcaactggagggcttggctttacatacgaccaaatattctgggttggtaaaggcaactccagcaggcaaaatcagagcaatccctggaaaagaggaaaaaactgaaactgatcatttgtggacatttaaatttaccaattgtctagaaattccatacaagagctgagatatatgctcttgttccaactgtgcacttacctttgatacttcattaagtaaattattaatatttggcactgatctaaatatgcatgtcccatctgttttacaactttttaaaaaatttaacttgctgcctgatagttaaccaagtgcattgacagaaatgaggtaagtatgtgacccaagtctgagcttaggtttgaatgcagctttctaatttctaatgctgtgctttactcatgatccacattatttcatcaaaaagcctcacccctctgactcctcaggggttcataatggcacaaaatttaggtcttgccctctactaaagggatggaattaacttttaaaaggggtgatgtttgatgcagggaagagaaagagaacagagagaggggaccactagatgacttactatagtccctccctttctaccgcagaacacagcagagatcagaggccagggctttccctttcatagaactgggaagagacagttgtcagaagctgcatgaggtcttggttttgttttacaaatctgatcttttaatcaagaggttcttattctttagaaacacagtggtccctgggggccactaccctttccctttgaaaacttgaattcgaattctctaagtcaaaagtgaaaggttttgtttgtattctaagaccagcacctatctagtaaccacttcaggaaagcagcaggatttgggagctaggccatgctttaatttacatatcatatgtccttatgtaagagaaagttcatacctttcaaaagaaaaaggaacgtttgcttttttacatctttgttgttcatctgactcatgaaagaacatgatcggttcgagtttatttttaggatatactggtactggcttttagttttagtaaatgttaagttggacaagttaggggcctagcttgggagctgcagaaattggctgagccccacaggtgatttatagataatctttccagtaagaacattgaagggctacacacaatgacacttagaaaaagaagggaaatgaagctgttccttgactactacccagtttctgttgaggtttattacttctagatgataaggtttacacgaagtttacattatgttttttcagttctcaagtttcagcaaatacctgaaccaagtttttttctgttattctaagaactgccctggagtgccttttaacttttgtaccaccacgcaaagtgtactatcaattcatgtcctttagctcttctattcttcaatgcatttctcccattcctgtaggtatggcggggatcaacttttcataccaccaagagtcacccctattccctttgaagtactgccctatggcataagcttgttcatacggtgttcaaacagctaccgttcacttctatgagggtcaccttactggaaaccaaggtatgacgagtaactaaatcttctcatcaagcagaagggagctggactttagaaatggagcctgggccacgcagagtggctcacgcctgtaatcccaggactttgggaggccgaggtgggcagatcgcttgagcccaggagtttgagaccagcctgggcaacatggtgaaaccctgtttctacaaaaaaaatacaaaaaaaaaaaaaaatagccagccatggtggtgtgcgcctgtagtctcagctactcaggaggctaggtgggaggatcacttgaacctgggaagtcaaggctgcagtgggttgtgattgtaccactgcactcctgcctaggcaacagatcaagaccttgtctcaaaaaaaaaaaaaaaaaaaaaagatcaagaccttgtctcaaaaaaaaaaaaaaaaaaagacaggaaggcaggaagacaggaaggaagggagggagggagggagggaaatggagaaatggagcctaggtttgaatcctggctccctcacttactggttgggtaacttacggcaggaattatgacttatctggaaaacagggataatacctgtttcagcaggttgctttgaagattaaaacttacaagtaccttgtaaaacacacataggttctcaacacgttaattgctttccatccaaaaaggttgagagatgagcagttgaccttcactaaccactctaggtggtttatcatctttcccagagaagctccggctatatactaagtatgcctcattcaggataaggatatagctagacccatggtcgtaactttcaaacatcaatttgccgacctttagtcaagcgtatatttaacatttaacgtaaaaaggagacaaaacagaagaacgtgcttcacgttacaggtggtaggaatattttgcctattaaaatgaagaatgtgaatacagagcctaagacttgggtgctcaaatttttatcaattgaatctgtacagccatgcagtctcttggaagaaaaacagactaagaacccactgccgtgtaaccttcaggagttgtgtcaaatgctggattagaaagctgaccctaattcagagtccctacttcttaataggcttcacacttttttttttttccaggcattaagcactgtaacctaagtgggaagaaagagatccacaccttccccaaagaaacagaagatggatctagtgtcaggctcaattagacccaattgtgatgactctccaaaaaggaacaatgcggcttttgtgatatgctcaggcagaaagcttggacattttacaaaacaatcttatcccaagagaaacctgggttccagccctcttcctggaaagaggggttgatccaggaaagttttatactactcttatcagctcttgctgagatcagtattttttttaacaatctcagaaacaacccagaccaatgtgaaaccaggaatatgaaccactcccctgttggagcactcacacccataggtctccacagccaaaccacagggtgtcagattattttgttactgtctaccaaagggaactcttgctggaattctggtatttcattaatctgccccgatttcagtctaaaaacccttgacagagtggatccagcggccagcctcggctattggaagtgctaaaatgcaaatgtgcaaaatcctggccaagctccccatcccccaggaaagtgcttccttacagccgggcctggaggggaatgtgaaaaagagggcttgagctgccctcctcctctccacccggaccctcgctcacactgggagattcagtatgcatgactgagccggcaagcacgcaaggacagcgctcttttaacttttctcaacaatggcttcagtccttccaccttcacatcctccccacacccactctcagggtaaaaaaaatccatctttcttgcccacgtcgtgaaccacttttcaacatcacctctagatctcattttcacccaaagaaaaactggccactcggggaaactgtgacttacatacaaatctggttttttaaaaagtttcattttgttcaatttctttaaatttccacgttgttgaaagtttaaagccaaacattatataaatctccagtctaatcacatttctagaaacaaaacatgtcagtagtaaaccttatacagaataaaattctacccatgagttgactcacccccacataggatgcaccaaactccaccttgcgtcctcttagagtatacaaacaacacctcctaccttggcatgtacccaagcacacaatgccttaaaaataattcgcagatacaaggctgttgttttttttttttttttcaaaaacatacttcatatttcctcttttattatataaatatcagtttaaccttttactgtaagaatataaacgttttaagaggatctttgttattatttatacaaattcacaaacagtacaattaattgataaaggtctctgggtttctttaactccatggtcttgcatgttgctgtggagggttctaaagaaataacaacaaaaatccaacgaaaatatacatcctactcagaagtgatttctttaaagccacaagtcccaacccccaccaaaagaaagaaagtcatctattcctccatttagaaacggaattttttaaaacccacaaactcccattttgttaatagaacagagataagatatgagcttcatcacagccccaggggctctgcaggccagctctgctcctgtttcccacaggaagccgcactgtgtgacctttttggggggaaacttggaagagggtgagggtagggcagaatttgcatatataatcatcattttcaagacacaatctgcatctccaacaaaaacaacggttcaactctcattgctcccacatatttgtgctataaattaagatttagaaataggtcctcaaatcccaatgaacaaggagaaaaaggaaattatagccagaatgtggaagtggggcacactggacggatggaggctgggaagaagccaacacaaaaagacggacaaacccaagggcatctttccagtctaggcacaaacatgtttcagtctcaaaatatctctcttgtagaattccagggcttcagaaaaaaagtaaactaaaacgaggtagccagacatatatatgtatatatatatatatataatttatatatatataatatatagaatatattcagcagaaaaaaggaccatgatttcaaattttttccaaaaaaaaatttttaaacaggaaagaagattaagaacatgaaatgagcatgaatagcagagtactgtaagaggaggagtgatgagaagagactgggattagttacaaagtggaagggtgaaaaggcctttgtagctgggtttgctttttatacatttcaaaataaaaaccagatcacagtattcaaatgaaagctgaagtgaaagcagacattttcctcaactccccagggttgaaaagaccagtcactccccacccccatttccagtcacagcagtggggatacagtagctgaatcagtcctccaccccctgcaggggagtgggtgggtaagcagcagagtccatctctccatccgcggggaaaaggagctgggagtagggtagggtaggaaccccagctgcaaagagaatgggctggaagccgggagggggctggaggagggaggaggaaacgagcctgaggcttctgtcatagccccatctcatccgctgcaatgatctgtgcgtaagtgtgcgtgtgagtgtgtgggggcggtggtaatgggaggatgaacagggcgggacaaggggagctggtgctgccgccctcacctgaccttctcactgtccgtcatctgccagagtcccaggttgagtaccttgaggcacggcagctgcgtgatgcgctccaggccgcgcttggtgattcgggtgcagccgtacaggtctatgccggtgagttggctcaggtgctcagcgatcagctccaggcccttgtccgtgatgcgcacacactgtccaatgttgagcgtgcgcagcccgtgcatctgccgcaccatgcggttgatgccatcatcactgatgtggcaggagcagagggagagagacttgaggccatccagcccctgggctatgtaagccagactctggtctcccaccttgtcacagaacgaaacatccagccccgagaggcgcaggctgcccatggccagatgcatgatgcccgtgtcactgatgttgtcacaggagcgcaggttgaggctgcgcaggctgcccatgtgcgacaggtgcaggaggccagcgtccgagattcccccacagaagctgaggttgaggagcctcaggcccgtcagccctcgggagatgtgctttagagaaagatctgtgagcttctggcagtcctgtagcgtgagctgctccaggcccaggcagccctccgccgcgctgcgcgtcatgccggccaggtgcccgatgcccacatccgaaaggtggcggcagctgcggaggttaaggctcttgaggcgctgcagaccccaggcgatgagcagaaggccagtgttggtgatgttgctgcaacctcccagctccagcacctccaggcccttgaggtactgggctatgcggcccaggctgctgtcagtgatctgcttgcagaggctcaggttgagagcgcgcagggagccgatctcctgcacaaacgcgtggcccagcccgttgtcggtgaggttgtagcagccgctgaggttgaggctctcgatgttggccatgccctggatcacgtagctgaggctgcggcggaggctcaggatctgcacccggcggatgccccgggcctgcaggctggggaacagcgacgggttggcccggcgcaggtgcagcttggcctccaccccccgccacaccgacttgtggtaggcggcgtcccgccaggcggtgcacacctgcgccgcgcgccccttgtcccggacgtccaggtagccgaagatcatggccagcagctccgggaacaggcatgagatgtgggtctccatcttcctcctcccccctccgcggcgctggggggaggaggcgcgggccccgccgctccggcctcgggcaggcgacgagagcgcttctccccagccgccgccgccgccgccgccgccgcctcgggcccaacggccggcccctccccgccttccggctccggccgccgccgccgctcctcctcctggtccgtccgtccttccttcctgccggctgcgcctccggcccggccctcccccgccccgggctccgcacggcgctcacatcccgggcggggaaggcgcctcgctctcgctcccggaggccggccgccgccgccgcctcggctctacccacgccgcgcccgggccgcgccgctccgcccgcgccgccgcgcccacgccccctgccgcatcctccgcctcctgccgccgccgctgctccgcgggccggcgggcggcgagggggccccgggggccgggcgcacgggctccgggcgcggaggaggcttcctgctgcctttgtctctcgcccgcttttcaaacctcccagccccgggccgcccgcactccgccgcccaggcggggggaccaggaggccaatcccggccggcggcgtgcgttccttctcccccgccgtccgcggccacttgggagctgccggcccccgcaccaaggacgccgcggccgtccggccggagcgcggctcggcgcagaccccgggcgagcaggcgggccgtgcgtttggtagcgcccgggccggccccggctccgccgccctgcagcgcgtcccctccgccgctcccgctcccccgcgcccgcgcaatggtacgggcctgcgctgccggaactgtggagccgttgccctggaaaccgagttcggcctggtcccgtggcccctgatttttaaccctgtgggcgccacgggggagcggcagctgtcagcagagcgcctccccacccggcttcttttcacccggtagcccgttattgagccgttccctctctgggccacgccccagccccgttccttctttttctttgctgttgaagtctgcgcagccccttcccacagtttacccctgcaattcgttacccttatttcacacccctctcccttgattatccctgcgagagccgcctcctatagcagtgctcaataatcgtcaccccaactctccttttcttactgtccctaatgccccttaacgcctcattatcacaccccctgctcccccggttggggctgtttactacgacgcctttctctccagtcttgtgtcttaaattggagagaaactcggctgtactcatcttaaacaatgaccccctccagtcggtgttctagaaatttctagaattatccatgactacttccttctagcatcttctgatggtttccagacacgctgtgtgtgtttccctcggtacttgatacatcaaaacttccctctacttctgaacgctgctgcgccaccaatgccctcagtccgctttgcttacaggggaacagccttcccctaagccttgttttaggagctttctccttgtcatcagccttagactatcagttgtatggctcagttgtactgatagtcaatatattcgtatatgctgaatccaatttactttttgattaaaatggaatgacagttgaacttggtttaagacaatccagtcgtgtctgttggtttatcaaccgttttatggaagcagggcacaattccattctaggatgtagcccctgggtcctaaatgtccgtactaaggatagaatttcagaagtttcattttaactacccccaaaccaagaatttttggatcagagaaaatgatcctctgtattttaatttatggatccacacaactagatacaagaccagcggatttatcagaaagggaaaatggtttcattgattctttgaggacctgaacaagatttggaaggggttccatattcagtgtaggagagtaacttttgcccaagcaaccactattagaccaaatacatacagattcagtaataggcataatacaccttttacacccctaccactcctctttcctaaatcaggaaatgcagaagcaaaaattctcgccagcttgttacctcacccacattacacgcagtgtggagcccatagatttttataaccttcttgaaaaaatagactgtactgttagtcatccagtacatccagatgtacggtggcagtaagtgtcacgattctggggtatgcctgggcttcactcttctcctggaggttatctaggcttttattcttctcagtcacttctgcctaaacgtttaccttaaattctgcgcaaaagtcactttttgattgttctgtgcacctagatgtgtttgggttgatgtcaaggccttaatccaaagcaccttagtgtaacttaatcctgcttaataaaaaacaaagtaccccacacatttggggggaattttagacaaggggcctgaccagcctcggactaagaaggagcctaatggttttccttctctagaaaggcccttgttctcaaatctgaagagtcattcagaggtatctggaagcactttctctagaagttggccatctggtcctcgttctaacaacagtttttcttgaattctagaatcttattaacacaaagccttttatttaaggcactcaagtatatattataaggattttcagcaatatgactattttcaccttcaataaataggaaaatatagcatcaagaagcatcacagaaaaagcattcccggggaaaaggaactagggcgtagaatgagccctatgccgaatctgaacacctggtgactttatgctactgaggaaacgactctcctttctgggtctcggtttccttgtgtaacaccaggatgatttgactaggtaatcttcagggacctttccagtaggaacactctgaggccaagagcctagcatactgtctccttaacccatggaacaattacacattgttcctaatgcaggctccagatattaagaataacttcgaatacaataacttcctgggagctttggtttatgctcagacttaggacacaaaaatatatgaagaatatgtatagacaggagactctgattgtctggcaaagatgtataccaatgtagaaaatcctgtggcttgctcttcatatttttaaaactggttgagatttttgtatatgatttaacaagttgcaaccataagttttttaactagcctatttaaaagcagaaatgatagccttgtgtagggagtctctccaaagccttacaaagaattttttttttaattctagatttttcagatggaatgtgcttttcacctgggtagggtgggaaaattgagaggcccaacccaaagatcaggcttacctaaggattcatactttctccttcagaaggggaagacctggcaggaaagatcagaagagctctgtagcttttaactcctcattcaagtatatatatatatatatatatatatatatatatatatatatatatatatatctccaaaaatagtggcccagagtctagtttatgggttgggtcagaggagttaacataggccgggcaaagtggctcatgcctctaatcccagcattttgggaggccgaggcgggatgatcacttgaggccaggagttcgagaccagcctggccaacatggtgaaaccccgtctctactaaaaaaaatacgaaaatattagccgggcatggcagcacatgcctgtaatcccagctactcgggaggctgaggcatgagaatcgcatgaacccaggagacagaggttgcagtgagctggtactgtgccactacactccagcctgggcgacagagcaagagaccttgtcaaaaaaaaaaaaaagttaaaatattttgtgtctattttccttgaactctagtgtatctatggcacaatgcctgctatgtagtagacattttgtcagtgttgttgaactgaagtgaatgagatggataatataaataataatctctttatgaaagacttcatacatatcgaaacttcttcgagagttctgggcagccattagtaatctgaggtttataataaaatgctgcctttccaacttcaaggtttcttgagagtaacattcattctgttgctcagtatttctaagtaggagagcatctctctcgacacttcttcgtgacagaatattaaagataagagagggtgaggatttgattcactgattgcaaataaaagatttaagcagaaacaacaaccaaaaaaagcccaatttaaaaatgggcaaagggtttaaatagacatttctccaaagaagatacacaggtgatccacagcacatgaagagaggctcaacatcattagtcattagggaaatgcaaatggaagccacagtaagataccacctcatatccataaggatagctactattaataaaacagaaaataacaagtataggtgaggatctggagaaagtagaatcctggtgcactgtgggtgagaatgtaaagttgtgggccaggcacagtggctcacacctgtaattccagtgctttgggagactgaagcgggaggattgcttgagcccaggagttcaagatcagcctgggcaacatggcaagaccccatctctcttataaaaaattgtgcagctgctatggaaaacggtatggccatttctcaaaaaattaaaaatagagctaccgtatgattcagcaattctgtttctaggtatgtacctaaaagaattgaaagcaggggttcgaagagctatttgtacatccatgttcatagtaatgatattcgtaataccaaaagttagaagcaacccgaatgtctattgacaaatgaatggataaacaaatcatggtatatactcacaagggaatattattcagccttgaaaaggaaggagattctgacacatagtgagacatggatgaaccttaaggacactgtgctaagttagtaagccagtcacaaaaggagaaatactgtacaattccacttatatgaggtatctagagtagtcagaattatagaaacagaaaaaataatcattgctaggggctggggagagggctgatgcagaatggggagttgtttaatggatatagagtttcagttttacaagatggaaaagttctgaaaattggttgcacaatattgtgaatatacctaacacttctgagctatgcacttaaagatggaccaggcgcggtggctcacgcctgtaatcccagcgctttgggaggctgaggcgggcagatcacctgaggtcaggagttcgagaccaacctgaccaacatggagaaacctcgtctctactgaaaatacaaaattaggcgggcgtggtggctcacacctgtaatcccagcactttgggaggctgaggcaggcagatcccctgaggtcaggagtttgaggccagcctgaccaacatggagaaacctcgtctctactaaaaatacaaaattagccgagtgtggtggcacatgcctgtaatcccagctactcgggaggctgaggcaggagaatcacttaaacccgggaggtggaggttgcggtgagccaagatcgtgccattgcattgcagcctgggcaataagagcaaaacttcgtctaaaaaaaccaaaaccaaacaaacaaaaaaaggttaagatgacaaattttacgttgtgtgtactttacaattaaaaatttaaaaaagattttagcaggacaaacattttgaaataaagatagaaaaaaagagagaaaaataggtgaaaagtattcttacatcaacagattgccgggaaccccctgagatatttgagatgttcccccaaattattagcttgctgtatcttgtaaatgtaggcttaggatcatctttatccactaccgtaaaaataagggcttgtgatctgggtagccagagccttcccgtgagggtgaatgtgtgctatattgtccacactgggaaacccacggaggtgaaagggggtgctgtactattagtattcacgcccgatggatggtcacgcccttttactcttgaaatcgggttgccatttgtaatttgttatttgcagcttttgagtgttaactataataggtgtttttgtagtttcaggcacccaaccaaagaatcagaaatacggtaatagaataatctcagatatcaggtattgtttgttcaatgttgacaaacaccttaggtacttgttacaaaacaggtagatagaacaactctaggaaaataaagtgtgttgtaaatgtagccatttccaggtcaccgaacacttagaaagacgggttttcaatttattcaatcattcaggctgggcagggtggctgtaatcccagcactctgggaggccagggtgggaggattgcttgatcccaagagtttgagaccagcctaggcaacatagcaaggtcccatctctacaagaaataaaaataaaaataattagccaggcgtgatggcatgcacctgtagtcccagctagtcaggaggctgaggcaagcgggaagaccgctgggccaggaggtcaaggctgcagtgaactgtgcttgcccccctgcactccagcttgggtgacagagccagaccatctctcgagaaaaaaaattcaggaaaatattaatacaaattatatacattgctctgtgctatgaaataaacaaagatgtagaagattacgtttttgcctttaagaacttgggatccagcaggtgagctagaaaatacctgtgacagtgacagtatttgttagtgttataagtgccagcagagtgatagaaataaagttctcagtttggaggatccatagtgaaacctagaatttgaataggtgttgatgggaagaatgtcattacattatagtggaaatttttttagagaataggctgaagttttatattgtttagaaaaaaataagaacattacaatagcaaccatgtattgtcatacattgttatggatcttccatattgaggcatcagttaatctaaaaaatctaaaaaatcactttcctaaagaattcttggcttttatttttcccaagaataagagatctggctgggcacggtggatcattcctgtaatcccagcatttggggaggctgaggtgggaggatcacttgagcccaagagttcgagatcagcctgggcaacacagggagaccctatccctacaaaattaaatttaaaaaattagccagacacagtggtgcgcacctgtagtcccagctattcacgaggctgaggtaggaggatagtttgagcccaggaggtcgaggctgcagtgagccgtgatcacaccagtgcactccagcctgggtaacagagagagagaggagagagagaaaaaagagaaacctttaactcttatgtatctggaattggaaattcagtatctgaagtcagaaaattttaattcatggtctggactttgcaactgtttttacaaccgagattgcctcaaaaaaaaaatttgttttagtcagctctctcctcatttgccccattcttctctctaacaatagaaccagacaaggatggaaaaagagggaagttcagggtgtcctgcctgtggcgtccacgtgtgactctcccctacgtgcccgtgctttctgttcccattcccgtgagctgcgttcacaccatacttggagtctgaagctgtgtgtttgaatccttgccctcccactgtagtctgttgcctgacctatggcaaagtcactcaattctttgagcttcaatttcctcatctataaaacgaaagtgattgtcgttcacggagctgtggtgagatgcgttaagaaaacatccacgagaaaggaagggcctagtgcatgcccggcacatagtagggacctagtaaatgctgtttttgtttttttcttgtataaagatgcactttgaaaaagaaaaaaaaaaacccttacagatgtgcctcagaattatacagatgtacatttactgacagtgacacttttttaaaactgtacttcctgttttaaagaaatgtgcaggttcgaagctgggcgcagtggctcatgcctgtaatcccagcactttggcaggtcgaggcaggcgaatcacaaggtcaggaattcgagaccagcctggctaacttggtgaaaccccgtctctactaaaaatacaaaaaattagccaggcgtagtggtgggtgcctgtaatctcagctactcgggaggctgaggcaggagaatagcttgaacctgggatgtggaggttgcagtgagcgagatcactccactgcactccagcctgggtgacagagcgagactctgtctcaaaaagaaaaagaaatgtacaggttcaaggactggaaacataacaaaagcgtaggcgcataagagaatgatctttcaggtagagccagccatgtgtttgcatcttatcttctcctctgtaagtcaggaagggtagcatgttccattcatgcgcaaagaaatagtccagaactcctcttctgccagacatccatccgtcctgtggccttggacctatggtttcactaccaactcttactctttcttttttctgagacagagtcttaccttgtcgcccaggctggagtgcagtggcgtgatctcggctcacggcaacctcctcctcccgggttcaagcgattctcctgcctcagcctcccgagtagctgggattacaggcacctgccaccacgcctggctgacttttgtattattagtagagatggggtttcactatgttggccgggctggtcttgaactcctgacctcaggtgacccacccgtctcagcctcccaaagtgctgggattataggcgtgagtcattacgcctggcccaactgttactctttcttttgcttagcgtggtgattctgaagcttgactaggcatcagaataaacttgagggcttcctgatgcaggacatctggggagaggcctgagaatttgcgtttctcacattgctgtcagcatcacctgggaactggggatcacagaactgagaatcgctggtagaacctcctagtacccaccttttttttccttctttaaaacttttgttaaattatacttcttaaaagctctctcttttttggcaaaattaaaatcctgtaggacaaaactatagtcccccgcccccctccatcttctgtcgtttagatcatgagctcctctgatacaaaggttgaaattttctccagtggtatggtggaaagaacttaggttttacagtcagatgaattctaggataaaatcttgactctgtcacttattagctctatgactttggacaaattatttaaccactaagaggctccattatctcatctatgaaatggaactagtgatttccaaatcttgggagttttgtgagggttgactggggtaatgtgtgtaacctcctagtatggtgacagaccgtaatgaaaacagcctaatgtttacagagcattgattgagcagtaggccttcttttaaggtctttacatttatgaacttccctaattgtgacaacagctcattttacagcctatgaagagggttcattactatctccattttacagatgaagaaagtacagcccagagaagggactggctcaagaccaaacagctggccgaactggaatttgaattctgtgatctggatctagagcccatatcccagccaccatgctttgctgtgttaacagtataagtttagcagtccgccttgctaggatgcagttactctatgatgccacgtaaagagaggtccatgacacagacagataaatgccacatgttctcactcatgtgtgggagctaaaaacaactgagctcatagaaacagaagtaggggtgaggcactgtggctcacgtctgtaatcccagcactttgggaagccaaggcgggtggatcacttgaggtcaggagttcgagaccagcctgggcaacatgtggagacccccatctctacaaaaatacaaaaattagcctggcattgtggtgcgcaccagggatcccagctactctggaggctaagatgggaggattgcttgagcccaggaggtcgaggctgcagtgaggtatgatcacaccactgcactctagcctgggtaacagagggagaccctgtctgaaagaaggaggctgggaagtgcagcagggaggggagggcaggagtaggttggttaatggatgtaaaattacaactagacaggaggaataagttctagtgttctaaagcaccgtagggcgaatatagttaacaatttattttatttgttcaaaaagctagaagagaggattttcagtgttcccaacacaaagaaatggttttcgaggtgatggatatgctgattaccctgattggatccattacacatagcatacatggatagaaatagcactctgtgctctataaatgtgtacaatttttacatgtcaactgaaaataaaaggaaaaaaagatgtgcaaatatgttttgagatctttaaagcgccatgtaaatgtgtggtatgttttgcttgttaggagtactgctgtcccattatgtatttgaacaactcctcataaagtacctttggcttggggaaaaaaaagagttaacagtgagtgtcatattgaccatactgtgagcaggatctggtcacggtgaggcatggtgatcatggaagacactcgaaggctctggttggtttgctagccaaaataggtcagagtgtgtgtgtgggggggggtgagagtgtgtgtgtgtgtgtgtgagagtgtgtggggtgtgtgtgggggggtgagtgtgtgtgagacagtgtgtgaggggtgtgtgagtgtgtagggtgagtgtgtgagagagtgtgtgagagtgtgtgagagtgtgtgggggtgtgtgagagtgtgtgtgggtgtttgtggggggtgtgagagtgtgtggggggtgagtgtgtgtgagtgtgtgaggggtgtgtgtagggtgagtgtgtgatagtgtgagagtgtgtgggggtgtgtgagagtgtgtggggtgagtgtgtgggaggtgagagtgtgtgagagagtgtagggtgagtgtgtgtgagagtgagtgtgagagtgtgtggggtgagtgtgtgtgagtgtgtgggggtgagagagtgtgtgtgagagtgtgtgtgtgagtgtgtgagaaagtgtgtgtgtgagagtgtgtgggggagggtgtgtgtgtgtgagagtgagtgtatgtgagagacagagggtggtgtgtgtttgtgcctgtgtgagtgtgtgtactgcagggtagatatcctgatacctgtttcatgccttcaggcccacagctggctgtggcctcgcaggaccaggaatgcgtttgtgtgtaattatgtcaccctctagcggtgacttccctactagccctttatccttgaaaagcccactcgggtgtcggtgacctctcttcccagtgacagcccgggagcagaacttcggggagattctggcatggagggacagtgctgggaaaagcggggtgtggccgggcatgaagagagtgccagggcccgggaagagtgaaaagtacaactaggactaatgaggagtgcaccctgccgagcagaaggggaagcaggagcgggccaggcacagcgtctggagaggagggaagagaaggcgctctcaaggggaggctcttgcgtgtcaatttctgccaagtgccattttatgtctgtggggtgggacggttatcgcagctagagctctttccagaatgtcagcactgagggccgaagtgggcgtggagaagcagtttcaattctgttttccaagggaagtaggcacaggtttagaggctgcctggagctgcctaaattccaaacgttcaccaccgtggagtggactgctgacttggctgcttctgcctagcctggggctctgttccctctgccagtaaaggtcattttatcaggatcctcagaggctttcgcatgttgataaatatttcaaaagacaagggggaatcaagatcagtcttactgagagcggatttggaactccgcgttcggcgggacgctgccgcccgaggcctgactgagccacagtgcgaagggtgctccctttttgaaaaggtgctggcgccaggccaggctttgctggaaagtcctatctggatgagtcagagcatttacatttcttacataatgtcagacccagaggagctttagggatcagcccagctacagagttcacagccaggtccccttttctgccaagaggatagggttaaaggttttaaaaaaaacaagcagagtctcaaggggcagaaaagcgaaggctcagagttaatgctgattaactcttcacaccccagaaaagatggttctgaggtaaaaccacacctttatgtcacatgatgccactgccttcctgaatccagtcattcctaaagaggtcagtaacaccaagcactgaccttcccgccttgtgtgcaggaaattaaagaggcatgaaaaccctgtccacattttctctaaagttggaacagcttgcctggggcttcagactgagcttcaatctcaagcttcagtgagattctttgttgtttattttttatttttaaactatttggccaggcgcggtggctcacgcctgtaatcccagcactttgggaggccgaggtaggcagatcacttgaggtcaggagtttgagatcagcctggccaacatggtgaaacctcatctctactaaaaatacaaaaattagccagtgtgatggtgtacgcctgtaatcccacctgctcaggaggctgaagcaggagaatcgcatgaacctgggagacggaggttgcagtcagctgagatcgagcaactgcactccagcctgggcgacagagcaagactccgtctcaaaataaacaaacaaactaactaactaactaactaacttactattgaaggccaaagagttcaagtaactaacataagaaatcagtggctactgttgtaaccatcaagaattctttaatgggccaggtgcagtggctcaggcctgtaatcccaacactttgggaggccaaggcaggtggattacgaggtcaggagttcgggatcagcctggccaacatggtgaaaccctgtctctactaaaaatacaaaaattagctgggtctggtggagcacacctgtaatcctagctactcaggaggctgaggcagaattgcttgaactggggaggcggaggttgcagtgaactgagatcacgcaactgcactccagcctgggtgacagagcaagactctgtctcagaaaaaaaaagaaagaaagaaaaaaaaaagaattccttaatttccttaatttaactggttcagggaacctaaatgagagttgtcacataatagcaaatcttagtgaccagatgacactcaaagcaggtgtaaatatttaacaaaagcactgtgtagacatttaatgacaatggttgctttttgtttgcttgctttttatttgtttacaaatgaaaataaagcagagaatgagaagtcactttctcagggtcacgggaacaattcaggttgaacgcatctctcctccgacatgccgagcgtctttgagtctcctcacccaggcgcacactcaggattgcagtcatctgctattgttgcctttatttattttgagacggagtctcgctcttgtcacccaggctggagtgcagtgatgcgatctcggctcactgcaacctccgcctcccgggttcaagggattctcctgcctcagcctcccgaatagctgggactacaggcatgtaccaccacgctcagctaatttttttttttttgtatttttagtagagacggggtttcaccatgttggccaggctggtcttgaactcctgagttcaggtgatccacccgtctcggcctcccaaagtgctgggattacaggtaggagccactgcacctggcctattgttgcctttttacttgatatttcaataaatttgtgagcaattggaatggtaagaaattcgctgcagtacataaaagtttgatcacttagactgctgtgtgattagggttgctcagtgatcttccggcaataaagggaggaaaaggagaaatttcagatggagtgatgatggatgtcctcaggcatgtcaatggctgctgaagtgctatgggaaaatggaaaacacaatctttgggatccctctttcagccattttcctgcttttatatctataaactttaaaaagtagggcatactttaaacaatagtatactaagaaattgtcaccgctggcagagccaaaattgaatcagcttgccttgtgattacatcagaaatgtgtcttagtctgtaaagcttcactacaggaaatgcccaggagctgctaataaagtttaatacacatttgcttccttaatgctatattaacatcctgaccatcacaactttcattgtaaacctattgcttattaaaaacaccctgtaagatgtcacaaactgacagaaagttggggctactacatgaattaatatgctaactagtatttttcagtgttatatagtataagatagtaagtgcttgaaatatgagcattttgaaatccttggccagcataatcccatgggtaacactgaattatccatggctgtgggagagagcaggtggttcacttccaaccatgggttgtgttccaaactaagggtttttgtttgttttgttttctttcttttaaagaaaatcaagtttatttttgaaactgttcattttaattctaagacaaagctagaaaaagaagaatggaagatctggaaaaaaagcattgtcaactgtcactgtcctaccatgggaaagaaatgtcttacaaacggaaaaaaaagttggagagaacgagaagtttctggtgttatgtaagaggaagcgcccagattacatataaaagtcaactgcttcacgccctgttactaaatattagggatgcaaaatacgtggtggcagtaagtcagagcctggtttcctaaatatttcttacatgttagggatcctgagagatccctaaacaagtagaaaattcttttttttttctttttgagacagggtctcactctgttgcctaggctgaagtgcaatggcataatcatggctcactgcagcctcaacctcctgggatcctgggctcctgggctcctggggtgatcctcccacctcagcctcccgagaagttccactacagccagccaccacgcctggctaattttgcatttttagtagagacggggtttctccatgttggtcaggctggtctcgaactcctgacctcaagtgagccacccgcctcgtcctcccaaagtgctgggattacaggtgtgagacactgcgcccggccaacaagtggaaaatactatcctgaatgagtgtgtgtgtgcctgctgggagaatatttcctagtgtttcctagatccttgttagttgacttcccacccacaaagccccagaaggagtaaactgtctctaaatatcagaataaacaacaacaataaaacaacttttatattttcatttctttttctttttgttttgttttgttttgttttgttttgttttttgagacagggtctcactctgttgctcaggctggagtgcagtggtgtaatcatggctcactgcagccttgaactgctggtctcaagcaattctcctgccccagcctaccaagcagctgggactacaggcatgcgccaccacacccagctaattttaaaattttttgtagagacagggtgtccctatattgcccaggctggtctctaactcctggtctcaagtgatccacctgcctcagcctcccaaaatgctgggatttccggcgtggacctcactgcccagctaaaacaacttttaaaaggtatattagagatccaactagattctactcttgcatttatctgcagcatatcagtttggtttgcccatggttaggtggttcttggtctgggtcttagtttcatgcgtctatgcatatgtggaaactcatcaagctgtacatttaagacttgtgcgttttaactctgtgtgttttgtttcaattttaaaaagtttttatttatttattttttaagtcagaaggggtttaatgggtcaagaaaagtttacttctgtgcacacaaattatctcaaggtctgtttgttcaaacagggtaaccaaacagggaccgattctacagtggctgctgcccggagttttacacagatgggagcatggccgtacccctgaaccctccaaccttctcttgcctgtgattaccactccttccctggccttttctggcctggctgctttcactgctgaagtagggcaaggattttgtttctcttcattacccttcaccttgccaggcctctgttcatcccatccctcggcccctagtacaaagtatgcagttagcactccataaatattgactttaattttgattatttttctctggttaatatgtgttgggggccgggtgcggtggctcatgcctgtaatctcaaaactttgggaggccaaggtgagaagatcacttgagcccagcagttcaaaaccagcttgggcaatacagtgagatctagtctctttttttttttcaaaataattaaaaataaatatgtgttggggtgggcagtgagtgcgggaaagaagggggaaagggagattgtttctaatgtacagacggggagacgtctggggctgcgtaggagctggggtgaagagcacaaggcattctggttttgcctctgtatttgataatgttttcttaatgttggaaaaatgcaatagttttatcatttgccacataccttcccatgctgttccctactgaaccaaatcaggtcatattatactggctatgttatactgcgctgttttccattgactttttggttattgatattggcttttagtgttgggtgtgtggtttcttttcacacaaacatgaatacgttgtaccactgagattttcctaggggttcagtcattttgagttggagatggtcattgggatgcatttttacattcctgttctcactttctttttttttttttttttttgagacggagtctcgctctgtcacccaggctggagtgtagcggcctgatctcggctcactgcaagctccgcctcccgggttcatgccattctcctgcctcagcctcccgagtagctgggactacaggcgcccgccaccatgcccagctaattttttgtatttttagtagagatggggtttcattgtgttagccaggatgaccttgatctcctgaccttgtgatccgcctgcctcagcctcccaaagtgctgggattacaggcatgagccaccatgcccggctcctgttctcactttcatctgtgggtgccacccagagcataggctttctatggaacagtgaatgtgcttacatatgagtagaagaagcgaggtttttcttatgcagcccgggagacaaggaaaccgctgtgatgccgtgtgccaatagcatgcatttatttgtggtatatcagagcctcagatccagccatcccagacagtcacgtccacaaggatgagacccttttgcaggagacagagaacacacctcccttattcctgctccagcagttgagatctgctggagacccttactcatgtttcctggacttgaactttaggacactggccactgggcattttttgcagagggtactcattagaatttctctttctgtcagttttttagcctattttttaagctaaatttctaaatgcttttgaaaccaacggtgttgttttattttgctgatagaacccagatgcgaggagggagttgtttttttttttttccttccatcatttgaatcattgcacaagcaccgtatcacctagaaacagagggtgatttcaggacagtgctgtggccacaaagcatggttaggtttggaaaagcagcagggaaaaaaaaatgccttctgattcaacacttccgttctatgtgatttaagcacatatctagttacaaggtttctttggcaaaaacaattttttgctctggagttagccaggcaaagccagcgtccccctggccagttgagtttgaggaccatctgcctcacacatcattagcagcattgtttgtttagggcccttctgtagaatctttattcatggagaagtagaagaaaactcaaacagctcagctggatttccaggtcctgcgtggaatttgtaacccctttgacttctcaactgagaaaattggatgcggctgtcacagaaagagaataaatacggaaccccacaatgctatgcttgcagccacttttattccattgaatttcacacataatgaaaggcaggcatactctgagaggcacggagctgaaccagtgctgggagtcctgcaattccaagtaggttgagctggtgataattctgggcaaaatactttagtcctctttagttggccgctggctaaagcatgcgggcagtgatacggctcctgttatcctactgcgagtgttctgcttttagaactaagaaaacggtgaaagaggaaagacaagtgattagttaacacctaaaagatgtatgccctcacgaataatcaaagaaaggcagtttaaaatttgatagcattttttccctattgtgagaaagaattttttaaaatgataatatccaaacatcttaattagcttttgtcatttaaagctaaaacccagtttagtgttttattagacttgactttcatgaaaggttgggaattctaaaaataacttattttgaaagagtaatgaatggcccaacaaacttaatggtccagttcaagctattggttgactggtcaatagatgctagagaagttaggactggaaaagacgttagggcttatgtggctctgccctgtcattttctaactgagaaggctgggacctagagacgttgtgtgacttgtctagggtcacacagttgtacggaggctggaattgcattagtaaaacatgatgagttgttatttagatcttgctctcagcaaatagcttcatataggattaaactttttgttttcaatacctcaaggatgttgagcttccctgtctttccagacagacaggatgtccgagacctcaaatcaggcactgttgcctcatttattctttgtccttagatgaacgagtggctggatacctctacatctttagaaaaaaattttttgagatacagtcttactctgccacccaggctggagtgcagctgcatgatcgtggctcactgcaacctccaactcctgggccaagcgatcctcccacctcagcctcctgagtagctgggactgcaggtgtgcatcaccatgcccagctaatgtttttatttttgtagagataggggtctcactgtgttccccaggctggtctggaactcctgggctcaagtgatcctcccacctcagcctcccaaactgctgggattgcaggcgtgagccaccacatccggcctagatctgtttaatggggataataatcctggcacaattgatgtccctttgataatcttgaaaccccttgagcaactacaaataaaaataaggcatgtacagtctaaaagggggataaacgtatataggtaagtctaatacaaaacagaataagtgttgtaagaggttgtattagttaaggtcttgaggttcctgtaacaaacaaatctcccaaatgtaaattggctctagaatcatagaaatttatttctagcccatgtaaaagccaaaatagatgttcattattatcaggcaggtctccctctggtaattttggggcttgggcttcttctgatttatcactctacctttggcctggttttgaaggccaccatgcttgtctgcatcaagctgaaagaagaaaagcgagcttggaggtctcctggttggagatttttagaggccaggcctgggagctgcagacatcacttcttctagtatacctttagatagcacccagtcatatgaccacctctttgtgcagtggatgctgggtaatgtagtccagcggtgtgcaattttagtgaccatcaagtgatctctgctacaatgggctttgagggcccaaaggaggaggacgtcatatgagagtgaagtaacttattggacaaatacacacatgcctaggagggtggaaataattaataattatttctactattaaccgtgattttgtcttaattttaataagagggttatatatctcttacatattacagataatcttcaggaatcttaggaattcctaaatttatcctaatatttaggaattcctaaattcctgaaaataaggtgggatatgtatctcaatttgtttgtattttcaggagtggtgactctttctgatccatggcctgtgcttacaagatagccggatcccatggagatcacacctgctccagctgtctcatgcagcttgggaggtgaccacagaaacagtgggccctccccaaagccacatgcggatagactatagtcaggactcttcatctccattcagcagtgaccagaggccagcggcccgaggcctgtgctggtggtttgttccagctgcggacatttgtcatcccttggctgcataaggcacagaccacacctcctcgtctcctttccactcaggctgacagtgctctccttctgccccttgtagtgtttctactgaatcagacctcccagctgggctcccaccttccagatgcttaccctccacactccatccatcattattggagcaaacgattaccagagcttttctaaatccacatctgatggtgcctctcccctgttcagatgcctcggatgtctcctgcagatgacaagagacgcccaaactccttataagggggccccaataggaaggttctgcttcacgaagaattaatgacttttgtttgtctttagattttggctttggttctctctctctctctctctgtctctctttctctcccccttccctcttctgttttctgaagttgaattttggacttgaaactacgtgtcatgtgtttttcaggcctctgtgcctttgctccttgggcgggtctcattctcctatctccagctgtgagaatcctgtgtgtcctcttagggacaggttcaaataccatcacccccagaaagcatccccaccgttggaacgacatagtctttctcagctgtttggatagtaattgatacctccattataacgtattgccctgctaaatgttataatcacatatgtttgcctcacctctacgagattcctgttattcaaccaagagttcctgttactcaactttgagtaagacctaatagatgctcaataatattagttgacttgaattaagagtcacagaaagaattccatttcgattactttttggcattttcactgggtctgaactttttcgtttactctgagtagcaaatttaaaatagcaaacaatttggttctgatcatgggaaattgctctcaaggtcattgcagaatggctgcttttcctaaagattacctgcaatgatggaagtataggttgtcattggaatagaaaatggttgtctccatggctggtaggtggggtcttgctcctgggcggtaggttagagtttgctacccttaccttgagtgccatggtactttgcaagtaactctgttaaagctcctactgcaccacgtttaaacaatggatttcaaatggaactttcggttttgtacaagtgatgatttgtgttcttgcctggcttccactctagaccagcactatgagacagtccataagctctctgtgatcatggaaacgttctataatccgtgctgtccaaaacaatagccactagccacttgtagctactgagcccttgaaacgtggcttctgcaatggaggaactgaacatttaatttaaattcatttttaatttaaatagccacatgtggtcagtggctaccatcttgggcagtgatattgagttcctaggagagtagcattgtattaattgattggaatatcctatacagtactgtgtattgagtaaacctacagtaagcatgtgttaaatgatgaacagttaacatttattgagtgcctgctgaatgctaggtgcttcccagaggctgtccttgtgttaccttcattttctgcagagccccgtgctggggcagcatagacagcaagcttgacccccatcattgcagccttcaccaagaaaacaggcagtcgagggagcaatttagcaagagggtcaggagttccgtgaaaagaagcctggcagagccataaaagaaactaaagaattttggtggtgaaccaaaagcctctgtaacctgcccaggcctgaatttggtgatcatgcttttgcctgaggcagccacagaggttatttaattctcaaaactagggcctgtgagacccacaaacctggtctgaggtttgctagcagggactctagttttggcaaagggaatgtgaactgcttagcattggagggggagacaggagagctgaccaccttggctctgaatgttctcatcggtgaggaaggaactggtgctgtgcctgagtgggcgtgaacttgttttgcctgtggttttctttagaaagctgcttggttcctcttctctcaaaggatttggaaggtcttccccgcacaatcaaaggagcagtttgagacacaggggcgacagctggggacagcattagagggacccacattacttagagctactggtttccccccagataaaaacccaggtgtcgtttctgcatgagcagtgagtgacgaggagaattcgcttgcagcctctccgctacgctctgcctttagagtccctctagccgtggtccctgtgttgccgcttgcccctgggtacctgactgatgaagacaggctctggggctcgccgttgaaggtgctgtggacccaggggtgctgtccttccgctgttccattcattgcaacattcatctcctgcctgtttacaaaaatgaagcaattatcctattcttccaaatggaaactgctaatttttgaagcagaaggttgacagcttcagtaagatctcaagagagcgagaagactggaatcaggtgaggccataacttcttatctaaacttagtttctggggtggaattacagaattgcttagaaaaagagtcaatataactacttgcagaaaataccacctgtaaaaatccagatttataaatggtgactatgcatttagtacaatgattatcatatatgtaatatataaaatatatatataatatgtatattgaggtccctttaaagaacagcatgatgggctggctcatgcctataatcctagcagtttgggaggctgaggcaggtggattgcttgagcccaggagttcaagactagtctgggcaacatggtgaaactctacaaaaaaatacaaaaattagctgggcattgtggcatgtgcctgtagtctcagctactcaggatgctgaggtaggaggatcacctgaccacagagagatcagagctgcagtgagccatgatcacaccactgcagtccagcctgagcaacacagtgagaccctatctcaaaaaaaagaaaagaaaaagaaaaaagaactgcatggcaaatttgaaagtcttttggaacatgacttgtgaatgctccaaacattccaaaatgaatgagtgaagtagccaggagaaagacagcagagagcagtggggatttgggaaagttagagaacctgtgtgccacccaccaagacattcatattccaaagatttgtaaacattgtgttagtcaaagacacttgggctgggcgcagtggctcatgcttgtaatcgcagcactttgggaagcctaggagggaggattgcttgaggccgggagttcaagaccagcctggacaatatagggagacccccatctccacaaaagaatttaaaaacttaaccagacacagtggcttacacctgtagtcccagctactcaggaggctgaggtgggaggatcgcttgagcccaggagttcgaggctgcagtgagctgtgatcatgccaccgtactccagcctgggtgacagtgagacgatgtctccaaaaaagaaaagacagctagctgactgccagttggtgatcctggttttaaaagttgcatggtttccccaggtcctttaaaaatacgctccattttgcaaacacagtagtacctctacttggtagcacaagacacatttttattctaattagcgcatggcatagagagaggttatccacctgcccttggtggtgatccagaagtccatttatttacttcattcactctaagtagacaggaatttgcagaaaacagtagcaattgcacaaataaatgtttttcccctatagtacaataccccagaactctagatctggtgaaaatagattacttgcaggacaagagcatctaaacacccctcaatcctccagcccttgaaaacaaagtccatagccttgttctcttgaaacaattcctaaaccacactgacctgtgacctatacacttctgccttcttttctagagcatattttaaaactattttattagtattcaggagaagggaacttcctctttcttatcatctgcacagaataagacttccagtggacttttgcttgatacctggggagaaaattgtgcttttccaagtaagatgagtcatctgagatctgccatttctgggaattgtacagggacccagagtcttagggatctgctctgcctactttgtggaatttattctcacagtgcatgagttggtcactttcacactgctccaggcaccaggagttggaagctggaagctctattctctggaacatcaggcattagattttagtgtgaaggcctcaggaattgtttctgcgctcctgccaccctgcactgtgattgggtctgttttgctatatacttcccaaattgtgtaccttatcactgggaatggcacacacatttctggggaagggtagtttagcatttttcttaagggccagaatttaaatctcatcactcctaccaagcccccagcccctcccaccaagcccccagcccctccccacccctaagacatttcttctcctgcaagccagagaaacaatgagaaaagacacagaatatttgggagatgaggcttcccaaaggactgctgcaatcatggtggagctgatacaaccctctccccgcccaattttttattttcatttctaccaactgtagattatgcatacacacaagcagatcacacaaaagaatactatgcctcagggctaggaggattcattgagcaaagcttggaaggaagaactagagagaaacctagagacagagaccctcgggagaaataattaaggctggcagggaaaggctgtgttaattgagctgagaagaaagatgagcatccggggattctcgtaagaggtggtggaatttgcagataaagtcattggtacattattggattcatctttggttactactttttaaaaatgttttttggggaagaatgctatctagaaaaaaattcatgcaagagaaacagatagctacagaactaaatagtaataactgaccaaaaaaaaaagtgagacagagggtgattttgccatatcctcatttcctggactgagcaagagaggaagcgaaatgctgagtcggctcctggcgtagcggctgccattcatgtgccgttgatccaggcctggcactgcgagagcaatacccattggtttgcacagaactccctcccaccagccccacctgccctcaaatagtcatcccacgtggttgtctctacctaaatttcccaacatgtttctttttgagtatgaggatcttcttttttaagtcaaaaaataaaaataaaaaaggtcacatgccccatgagaccataattgtactttccgccaagaaaatataatatataaagaccttcaagccattaggtattaatatgacttttttatttttaaatatttttgttgtctaatataatgcagaaaattgcatacagcataatacatgcacaacttaataaactgctgtagtgtgaactgccacatatccatcaccaggttggaaaatagaacattgctggtatcccaggaacttcctcgagccccttcctcatcacagccccctcccttggaaaccactccctgatgtcatcatttccttgcttgcttttctttatggcttaaccaccaatgtgtgggtccccaaacaagatagttttgctatgaatggaaccatagttcatatactttcttgtgacttgcttcttctcaatattatgttcagaagatccatgcatgtggttgcatgtaacttgtagtttgttttccttcctgcataataattctttgttgtaatatatcacagttaattgttttgtccattctattgttgatggatattgttgcttctggtctgaggctatcaagagtgctgctattcttttgttgttgttttttttttttgacatggagtctcagtttgtcacacaggctggagtgcaatggcgcgaccttggcttactgcaacctccgcctcttgggttcaagtgattctcctgcctcaggctcccaagtagctgggactacaggcacccgccaccacacccagcaaattttttttttttttttttagacggagtctcgctctgtggccaggctggggtgcaatggcacgaccttggctcactgcaacctccacctcccgggttcaagcgattctcctgcctcagcctcccaagtagctgggactacaggcatgcgccaccacccctggctaatttttctattattggtagagacaggtttcaccatgttggccaggatagtcttgatctcttgacctcgtaatctgcccgcctcagcctcccaaagtgctggcattacaggtgtgagccaccgcgccccaccctgttattttgaaagttagagaactgccatggggaaattcatttatcctttcaagagataagaatgggacataagatattgcaatttgttagagaaaaagaggtcaattagcaggctcttgtagtagctcatagtatgacaataggaatgttgagtagggaatatattcaaaaaacactatagagatacaatcaagagaccttggcaattgatttgacgtggaaggcaaagaagagggaggagtcacaaaggataccaagatttcaggcctggatacaggaagagaattggaagacagagaacacgcatgattgatatgaaggtgtgtaatcaatcagcattttaacttctatatttggctctctaggaagattcactcaacccacattttatgatcaaaaggacagtatccagggtgactggtcccctatgtctttgaccccattcctgcagtgttgcccccagaaactggaagcatgtcatgatgggagttttcctgggtaattgatgctgaattatcaatgggaataccaaatcagattttttaaaaagttaatttaacatttattatttttagagacctctgtcatccaggctggagtgcagtggtacaatcatagctcactgcagccttgacctcctgtgatcctcccgcttcagcctcctaagtagctaggattacagacatgtgccaccatatccagctatttttttttttttttttggtagagatgaggcctcactatgtcggccaggctggtctcaaactcctggcctcgagtgatcctcccatcccggcctcccaaagtgctgggattacagatgtgagccaccatgcctggccccatattagattttggagggactacataaatttcacgaacaagcaattctgaaaacagtggaaattattgaagtcctccttcattgcactatctctcctcttcttcgaaaagcaccttgaaattttctctttgaccaaaccacatcttcatgtgaaatcctttctgctgttttcctcctgttaaaagccctcatattcttcaaggccctactcaaatcccacatcctgagtacagctgctcccttaggctcttctgacacttctttttttttttttttttttttgagacggagtctcgctctgtcgcccaggctggagtgcagtggcgtgatctcggctcactgcaagctccgcttcccgggttcacgccattctcctgcttcagcctcctgagtcgctgggactacaggcgcccgccaccacgcccggctaattttttgtatttttagtagatgacacttcttatagtgtacttttctgggcaggttttctgttttccccagctagaccaatgcaccttggggcactccccaaggtcttacacatttttacattatcttattaagcagtgccagcctttactcttagaagctgaatgttacttatgtctttgaggaaaagacagagagttatgtctgggaccaggaatctccaaaatctcaattagcagtggattctcagataaggggaggtacagtcaagcagcttcctcacagcaaatggaccaagttgtatggaagtcgaagggactctccttgtcttcatgagaggctggccttcgtggcctgcttcctctttccctgagagccagaggagggcttttcttttctttcagtcaacaaatatttttctagcaactcccacatacccctgtgtactatcctatccactggggagaaaatggtaaataagaccgtttccagagcatatgagggacagaaacaaaagcacaacagatgagcatgccacactattccatgtcacattaaatgctgtggctaaaacatgtgagaagctagaaatagaatgatgctgctgggggccttctttggcagagatggttagagaaggcctcttggaaggtgtggcctcaatgacaaaggagcttgctctgcacagagagaggagaaaccattcccagaagtcggcaaggcacagcggggagaaacaggatgggtttgggtaaggaggtatcaggagtttggggttctaaagcacagcatgaaatcctaaagaggatggaaaggttggcggggccagattctggaaggcgtcatgtaatggggtgaggagttatgactcatcctttaggagataggaaacctttgaagggttttttgttgttttttttttttttttttttttttttgagacggagtctcgctctttagcccaggccggactgcagtggcacagtctcggctcactacaagctccgtctcccaggttcacaccattctcctgcctcagcctcccgagtagctgggactacaggcgcccaccaccacacccagctaattttttgtatttttagtagagatgaggtttcaccgtgttagccaggatggtctccatctcctgacctcgtgatccgcccgcctcggcctcccaaagtgctgggattacaggcttgagccaccgcgcccggcctctttgaagggttttaagcaaagaagtcacatggtcaaatctaagctttgaacagagctcctcgatcgctatatctactgaaaggcaagacagttttgtgctatcgaagtaagagcctttcttgctgaggacatagtttcttggtgagtttcactgttaaggccaatctaaaatgtccctccacgttctctccaaaccttatgtttcttcacgtgcactctgtacctcacctctgcatcttccatgagcccctcacaccaaaccaggatccacccttccagacccatagctcttgacctggtttgtcttttccatcccaaagtaaaactaagtaccaactctttaaaactattatgttttaattcctccagctttaagcagcctggcctgttctcaacccacatatcattttggctaggggagaagtctagttctttccgcccacaaggctgtgtgtgtatctaagtgtgtgtattaatactagtaactttgcatgttttgtaaaccttgctttttgtgatatctcctgcatatcagaatgttgttttctgactttcacactattcgcagccgtagtaacagggcaatggtgcaacgaagaaaagaaagaggctgggtaccgcggctcacgcctgtaatcccagcactttgggaggccgaggcaggtggatcacctgaggtcaggagttcaagaccagcctggccaacatgatgaaacccatctctactaaaaatgcaaaaattagccggtcgtggtggcaggcacctgtaatcccagctactcgggaggctgaggcacaagcatcacttgaatcgggaggcggaggttgcagtgagctgagatcatgccacttgcctaggcaacaaagtgagactctgtctcaaaaaaaaaaaaaaaaaaaaaaaagagaaagcagagaaggtgttatgctctagtgacagggaggacctgtatttggggaagagtagaaagatctggattccaagccagggtcaaccattcaattgctgtatgaacaagtacttaattttagtttccctgttttcaaagtgagaataataatggcatatgccacaaatgttggcagagattaaatgagaaaaatagatgtgaaacatttagtgcagtgcactaagaggtgctcaataaatgttgattaatactagctattgtcactggttatcaatcaaaagacatttgttactgctgagtaaaaccatactgggcgcaaaggggctcgcagagaaagtagaaaaggtaagtttgaacctttaggaagcatttgatctactagagaagtaagaagtatatacttcacctgagaaacagcccaaggcagcataagtggggtagggaggtgcagaccagatacatggattcataagggccgaagaggttgagacctcttcggtctcaacccatgagaatgagattctcatggggtggggttaatcaagcacagttttatggagggagtgaatcttgagcctggatgtgaaagtagtttaatatctggattgctgcagagcagaggagaatgcttccttgggaagaggatcagaatgaggtcttgggggaaaagtggggtttgttctaggagtagaaggacattggaaaaggagacttcatgttgggaaattcaggaaaacaatgagaggtaagatgaggccacattggaaataaagaactgggaaccactatacgttttcaaataggggaatattatgatgtaaaattagtattttagggaaaactggtattgtgtctatgtgcacttgtgagtgagaccacgaagaactactctggtgttcagatgccagaagggtgagtactcacctggaaattgggaaggaaatgagtgaacctgatgtacattttaggaggtatttgtctattgtgctgaggtccataaacagtctttctctacagtacgagaaatgagtggccaaagggagagaagccacaggactccagctagcaaggcctgctcctcctccacctgcccctcccctgtcccatggaaatcatccagtctgaggcccctccttcaacagcaatgcagccaggagttcacaaagggaagcatttcctttccaaagactgctaagatggtttaccctgttatgccaggaatgttaacaaaattgcaaatgtacttttattcttttgttttttctcttttttttgagacggagtctcactttgtcacacaggctggagtgcagtggtgcaatctcggctcactgcaagctccacttcccaggttcaagcgattctcctgcctcagcctcccaagtatctggaattacaggcacccatcaccacgcccagctaatttttgtatttttagtagagataggtgttgccatgttggccaggctggtctcaaactcctgacctcaagtgatccacctgcctcagcctcccgaagcgctaggattacaggcatgagccaccgcaccctgcctgttttttttctctctctttttttttttttttttgaggcagggtctcaatctgtcacccacgctgaagtgcaatagcacaatcacgactcactacagccttgaactcctgggctcaagcgatcctctggcctcagcctcccaggcaccaccatgctcggctaactttagatttttttgtagagacagggtctcactgtgttgcctaggctggtcttgaactcctgggctcaagcaagcctcccacctcagcctctcaaagtgctgggattataggtgtgagctactgcacctggccacaagtgtatttttttttttttgagacagagtttcactcttgttgcccaggctggagtgcaatggcgcagtctcagctcactgcaacctccacctcccgagttcaagcaattctcctgcctcagcctcccgagtagctgggattacaggtatgtgccaccgtgcctggctaattttgtatttttagtagagacagggtttctccatgttgatcaggctggtctcgaactcctgacctcgggtaatccacctgcctcggcctcgcaaagtgctgggattacaggcgtgagccactactccaggccaagtgtatttttttttttttcagacggagtctcactctatcgcccaggctggagtgcagtggcacgatcttgacccactgcacgctccgcctcccaggttcacgccattctcctgcctcagcctcctgagtagctgggactacaggcgcccgccaccacactgggctaatttttttgtattttcagtagagacggggtttcaccgtgttagccaggatggtctcgatctcctgacctcatgatctgcccgcctcggcctcccaaagtgctggggttacagttgtgagccactgcgcccggccgccaaatgtatttttaaattacacattctatagctccccactgggtgaccaagtaagagtgcttttcttttctttcagtcaacaaatatttttctagcaactcccacatacccctgtgtactatcctatccactggggagaaaaatggtaaataagaccgtttccagagcatatgagggaaagaaacaaaaccacaacagatgagcacgccacactattccatggcacattaaatgctgcggctaaaacatgcaagaagctagaagtagaataatggcgatgggggccttctctgggagggatggtcagggaaggcatcttggaaggtgtggcctcagtgacaaaggaggcctgctcagcacccttgaagaggtccccacctaggctcgtggctatttctggacaggtttctggatgtgacggtgcctgtctgaggagaggggcagatgtgggaggtggctccatttcctgcaggagtcttgagatgcttgagtccctgggtgctggggaagtcagttctagatatcagtgggtttgtgtgaatggctaatgacctgaaatcaacccctcatcctgtggggcagagatgttgtttcaggcactgctctgaagtatggtggaaagcacagagttgcttggggtctcagctttacctgtcccggtctctctttttggtctcttaactctaggctggatggacatggccccttaaggaaatgaaagtgagtgactgagtcctagcagaaaaaggaggagatcttggagttcctgtcttccaacacgcacctctttggttgtgatggtgaagtgggacagtgccatctcagcagggaccttggatgtgctctagagggggtcttggaggtgtagcatcgttacatcccctcccaccatcctgcctacacagtggttttgggggcacagatatttcagagagtagtcttcccaagaaccctacatcaagtatgctaccaccccttcccattcttgattctggtcccctctttattttcctcatagtattcactggacctaacttatgatacatttgtttgttcactgccatgtctctggcacttagagcagtaactggcacatattaggcacccagggtgtaattcatttgattaatgaatgtattgaatggctgcatggatgaatgaagaggaggaacagagcagatgtctgaccagctcattctggcttctggaaggatcctgattgggaattttgcatctttccctccccacagcctcctagtcactactactaaagaatagagaccctgactcccacttttttttttttttgagatggagtcttgctctgtcacccggctggagtgcagttgtgctatcttggctcactgcaacctccacctcccaggttcaagcgattctcctgcctcagcctcccaagtagctgcgactgcaggcatgtgccaccacatctggctaatttttatacttttttattacaggtgagctttcaccatgttggccgggctggtctcgaactcctgacctcaggtgatctgcccaccttggccccccgaagagccccgcattcttaactactgtgtttggtatgtttgaattgacacttgcctcttaggaaggggaatctttttagaccctggggaaatctgtagttattgcaaaggccttttcctgcctgttgggcatttaccagatctttcttcctacacaaggagagcctcccctggttgaatcctgctataaatctcactagtgacccacaaacaggggtcccaatgtgacctgctcattaacacaaaaccgtcagcccccatacagcttcctgccttcccagtcgggttgaggcaagaaatttccattctgcccatgctgatgaaaccagtcgccagcatttacctttctaaggggtcctttctcctcccaccccagcccaccccagcacaagaatgtaagagagggcaaacagctgcctggcttcagttctatggccactcaagaattggctcgcatctgtctgccaggacagagagcgtcctgagggggctggtgtgtgtgttgtgtgtgtgtgtgtgcacgcgcgcgtgcatatgtgtgtatgggggagttcagtttcaggtaccacacatctggaagtcagagaaagaagccactgcacatgttagagccattttggggggcaatttttaaaaaaaaaaacatttttaatgggctgagagccgcctcgtggaaagcccggggcgggggatggagtagaaacagctgcgggagtgattcttgtctccatatatgtttataaggcactgagggcgggattagcagctcctgggaagtctggctctagttaccgtgtcagcctgtcctgggggcagtcacagccacagtgaccattagcaggcacccaggcctgtctttggctcggaaacggtggcccccaatgtagcctagtttgaacctaggaactgcaggaccagagagattccactggagcctgatggacgggtgacagaggtgagaggcactggtgtgagggacaagtgtcacaggcggggaggaagaactccgctatctggtggtggaaatgtgtgaggatcaaagtccccagggagagtaggtgttgcgggcggcagggtggtgggctgggcacgggctgggcataggctgggcaggaggcttcggggccgcggggaggaggctggagaagcaggagggcacgggcggccctagctctgcaaccccgggaaggactggtaggtggagttaaggatatttggacaaggaaacgctttgaagcttttctctcgtcctccctactcgggacctggtcgcctcccctccataaaaccattagctcctggtgccagccctatctctgctccatctctcgtggttccagccggtgcattcacagaccttctgccccgggggacgaggaggatttatggggggagaggagagggggaggggcatcctccagaggagggggggtctgaggggagtcgggcgtggaagctgttagtcccgggctgggggccggctcacttccgagctggctctgcatgacaaaggggaaggagcaagtgtcttctttgatctgccccctgccggccccacacacctgcctgttggtgcccccgccccagccgaggcttcgagaaggaaaatcaaaagggggcttggggaagggctgtgtcccagctctcctggaccctgctcgggccactgtcctctcctggcggccccaggacaaaaatacttcccgggctgatgacccgaagcacccgccgccccctcccggggagcctggggacgccgacgcgcgagagtggcgcagtgagccggggcgcgcggggctgcgctcgtcaggtccggggccccggggaggccgctgggggcgcgggtcacgcccagacgggggccccggaggaccgcgggggagccgcaggggccgtgtgtcccgaggcgcaggctcgctctagcagcactgacctgctgcgggtcccagggcctggggacaggggctctcgggggcggatagaggaacaggcgtgggttacagcaggcaggaggccaagaggcgggaggcccgggagccagcagggaagggctgtggcatctggaagatgcgtcctcagctcaggcatttgatgccagagctgccgcctggcgtcggcagtgtccccggtgcagctgctgggcaaggtactcggtgccgccctcgaggaccacggtgccgggaggggcaggggccgcctagggaggcaccacctcagccgccagagctttccgggcgggcggttcgcggcgtggcttgtacatttctcagagaagctgccttgagaaagtgaaaagtccttgatctgtacgcaggggttgggacttaggaaacccgctgagggtgagaagggcgcagatggagaggggagactcctccctgggtgcaggtaaatccaattcaccaaaatgttttaatcctacaaaggagagcctgagggtcagagaaataagtctctgggctggaatgagaggtaggcacgtgggggagtggataggatgggccccatttctttggatgttctgcagcaaggacaggtatgctttacaacagccgaagtggcctcccggctgccgaacggaggaacgccgcaagctccgctcttgaaattacttgttttcatttctctttgtggtttctcagctcattatttctttggaaattaggtcctgtgcagggttcccacagtttggggtaagagacagaagtcctagggtgggaagatgagcagtgggaggcggaggctggaaagaggccgagcttctttgtggggaacacgcagcacgtaagcatcagtgcaactttctccgcctcaccccggctcctggtctgcccttatccgctgagtttccacactgactctccatttctgttttctccagggaaccctactctggaaactgtcagtcccagggcactggggagggctgaggccgaccatgcccagcctgctgctgctgttcacggctgctctgctgtccagctgggctcagcttctgacagacgccaactcctggtggtgagtaagaggggctgaggtcctgcctgcacagccggaggcctccttcagcgactgagatgaggaggaagggcaccgtgtgtcacggtagtaccttgattcctgggagtactaagggcctcttttatcccaggaaaactaagaacgctctgtgtctctctcaacccttatctttgtaagggttccctgaggataaaggttccgttcatttgatttttttctctaatcctgtccacattccttttccttggaccttccctcatgcccatgaattgttagaaattgctcttgggtcaacaagaatatcaatacttggtagttttttgttcctttgttttgtgtgttttgctggtaggatatagaattcctcttttataagtctgaaggccagatgaggggttcacagcaccatgggtggctggctttcttcttatgttttaagggctgttgtcattgccaagttgacagggaaatggcaggcgatcaccacctattttgcatggtctctgccactagcatttttactcagatagcaaatctgcagccttctcatctaacactctatatggctggtagatgatgagcaaaagggagagcctctgaactggtggagagtggatgaggggaagctcaaagtgagacatggcagtgaaaacaagtagactagatcgtgatgtatgtaaagtgattggattttaaaggcccaaagggagtaccacgcaaaggattgattgctttccatggcttatcatgtacttgggctgcactgaactagtcactcctactcattgaatgaggcctgtgctctcctgttgaggtttggctctttttgccctctattaaaatgaagagctgctccccacccctcgtcttcttatctgcctgacccccattcttaagatccagttcaaattctggccatttccttataaaggcttctcttcagccataagggctattttcctatctgatcacagcagatccagaagcatatccagagtctgtctggggcatttggcatctcgcatgtcctttgtgttcatgcctcagattccttcagtttgtcctttgaaggccagcactctgatttactaatttttctttccagggccttgtacacagggacgcattcaataaatgtgttgaatgaatgacttaatgctgcacacaggcgtatgctcactcctgggcctttttttcccctttctggattgctgtcctaggtcattagctttgaacccggtgcagagacccgagatgtttatcatcggtgcccagcccgtgtgcagtcagcttcccgggctctcccctggccagaggaagctgtgccaattgtaccaggagcacatggcctacataggggagggagccaagactggcatcaaggaatgccagcaccagttccggcagcggcggtggaattgcagcacagcggacaacgcatctgtctttgggagagtcatgcagataggtaagaggccattacaagagggctcggccaaggaactgcactcgtctcgtttgggagcaattaagctctctcaggactggcacagggagagcccaaaggcagcctaagtgggctctctctaggcttggcagcagtgtgcaccacgagagaggcacacgaggaagcaggctctgggaggctgcagaaaccacacgcttgatgttcctctagctctctgccttccagcctcacttggggcaggttgcttgggactcactgagagggggcaggttgcttgggactcactgagagggggcaggacatctgagttgacttagagtggattaggagagccgcccaccgccactgcctttgtgtctcagtgcaaaaaagagccttgggtagagaaccagaaattgcagccctgaatgtctgttggatttttgcctcttccacttcaacctttgacagagagatagaaatgtcggccaaagtgttgatagctgtcactaacccaaccccatccagtcccagctttttcttttgaaagagatgtgtgaacatgggggaaggggtcagacgaaagaaaagatgagagggagagggccaagtcttctggattcctgtcccttcccctctcccactgctggccaaggattcttgggccaccctattgcttagatggaggtgtgatctgaggtctaattgttttaggtccttttgaaatgcaatcctctcctctctggcaagaaattgagaaatccggccctattctactgggtcttatccccagggccataaaagggaagtgttagaatgctgtgttccttctgcctgacattctcccagaacacctcccttcaaaaggttacctgaggctggagtttccccagagagggatttcagcctgggaggggagttggggaggtagagatttcttcgtgctcctctcttagggaggatacttggaaggctccttccccctcccacttattccagacctctttccctaccctctctgtcccatattgagaagtaatgcccaatgcagtagctcacgcctgtaatcccagcaccttgggaggctgaggcaggaggattccttgaggccaggagttcaagaccagcctgggtaacatagtgagacctctgtctctataaaaaaaattttttttttctaaagagagagagggaattaaagatgggaaaagtacacattgaaacttgctgctctcttgcttccttcggtatcaactcagggtgcataaaaggaaggtcctagtgttcctggggcagctttcccaaaagagtagacttggggttttagtgggatttactcatagtttattgattcttctcaaacccacctggcacttgtctcttctttctggcgaaaatcttggcagcacttcctgccctgcgttttgggcaatgaaactaggacggcccaggtgcagagtctcctctaatctcttcagtggagttaatgtttattgaagacctaaagtaggcctgatgttggctagatccttttcatgtgtatttcgtgtgcataaaggccccaaagtgaggctgtactttaggaaagaaaggggttggcaggaaaagacactccgctgggttcagatgtgcactaggtggccagcgaaagcaaaccctgtcgaagagagcccatctctctgtgccctattccgttacaaaatggaacccttctgtttgcctaattttcccccttcctttttatagcatcactgaaggctcatgctacctaggaggctgtcctcccttcctcccccctgagcccagagtagctcctggtgagtcctccctctccctatcttgagaaggaccgtctaaggcttcctttctcctttgaagctgctgcaaaagtcggtcaccagagggcggcagagcagctcggaggagcctcggcccgttgcccagcttctgcctagggagtttggaggcaacttgggctgctatggaacagagagggcatgaaattgttctgctgtctcctgtagggaaaagacgcatgtccctctagtagctcacggctgcttttttttagccgtttattcttgagatggttagagattcaacctgaactgttgcgtatatagataaacccccacgttgcttatccattctgaagccccgaattatctctttcttgctgaaggtagcaacagtagatggtacttagtaggcttacccaagggcccaaaggctgccccgtgaaggcagagctgcccacactcagcttctgatgaagacccgactgaaagaggcaggcagcgcaccggaggacaaatcaggatcccaaacagtcatgataggttcgaactgtcagagtacagaacgtctggtgtgttagttcagctgcaggtacgtgattttagaaggcaattctgagaaggctgattcaactctgaaaagcatgtttgctaaagaatgatagaaataaatcagacatatgtagcttggaaaagtgaaaacgtaaaaggcttaatagttgttttcaaacactgaagagctgtcaaatgggaaagggattatagcagagtgcaagtgcagcaggcaggaatcataaggaggcgtatttcagcttaatacaagaaggagcattctggtgattggagtcatttgaaaaagatggaatggattgctttgaaaacctagcccactggtctgaggaactgtgtagagggaaagcttccggtggctatggagggtagctcggggctgaagcttgggaggctccctccgttccaggatgccatgtcaggtggttgaggctgcattttaaggagatgaattcctcaaagtggggcccagaccctcctccctgagaggctctttggccatcttaccatccccagtgctccttgtcacattctgagccccgtagaccgggtcctgtcggctgaatcatgagtgtaacttcctgccatcatttcggtttttcttgggctattcctatttcacaactgaccagaagccagccactggttaatagagaaaaacggactcactcagcatggtctgtttgtaaacttcactgtgtcatgcccagataatcaagaagtagggccaagggagagatttctctagacctctcggttgattgcagactgcttccctttctaccttccaagacaagactctgggattctgcctggtttaatctctgagatcaggattgaatctgtttcctgctaagaatcactcccttctctccatatctaagtccctataagtatcatttgttatttcttataacagctttattgagatacataactcccataccatgaaattcagcattttaaagtgtaaattcagtggctttgagcatattcacaaggctgtgcaactatcagcactgtctaatcccataacattttcaccgctccacagagaaactgcacacccgttaactgtcactctgcgtaccccaacccccaaccctaggcgaccactattctttctgtctccatggatttgcctatcctgggcatttcttataaatgggattatagaatacatggcctttggtgacgggctccttttacttagcacaatgatttaaaggttcatctgtgttgcagtctatatatatatatatatatatatatatatatatatatatatatacttttttttttttttttgagacagggtcttactctgctccccaggctggagtgcagtggtgtaatcatagctcattgcagcctccaactcctgggcttaaacaattcttccacctcaacctcctgagtagctgggactacaggcacatgctaccatgcccagttttgttttgttttgttttgttttgttttgagatggagttttactcttgttgcccaggctggaatgcaatggtgtgatctcggctcactgcaacctctgcctcctggggtcaaatgattcttctgtctcagcctcctgagtagctgggattacaggcgcccgcctggctagtttttgtatttttagtagagacagggtttcaccatgttggccaagcgggtctcgaactcctgacctcatgtgatccatgctccttggcctcccaaagtgctgggattacaggcatgagccaccacgcccagcttaatttttttcttttttaatgtttttgtagagatggggtactgctatgttgccaagctgttctgaaactcctggcttcaagtgatcctcctgtctcggcctcaaattgctgggattacaggtgtgagtcaccacgcctagtcactttttatggctgaataatattccattgtatggataataccacattttgattacccatttatccgctgatggatagtttggttgtttccaatttttgcctgttatgaataatgctgcaagaagcattcctatgtccatttttgtgtggacatatgttttcctttctcttgggtataaaggcatactttcgagatattgtgggtttgcagatttggttccaccgtactgcaataatactgcaataatgtgaataggcaataaagtgagttgcatggttttccagtgcatataaaagttatgctgcgggccgggcgcggtggctcacgcctgaaatcccagcactttgggaggcccaggcgggcggatcacgaggtcaggagttcaagaccagcctggccaagatggtgaaacctcgtctctactaaacatacaaaaaaaaaaaaaaaaaaactagccaggcgcggtggcaggtgcctgtaatcccagctactcgggaggctgaggcaggagaattgtttgaactcgggcagcagaggttgcagtgagctgagatcgtgccactgcactctggcctgggtgacagactgagactctgtctcaaaaaaaaaaaaaagttatgtttacactattctatagtctattaagtgtgtaataacattacatcttaaaaaaagtacatcccttaattaaaaatactttattgctaaaaaatgctgacacagaaacacaaagtaagtacatgctgttggaaaagtagcacggatagatttgtagcagggttgccacaaaccttcaatttgtaaaaaacgcaacaccggccaggcacggtggctcacgcctctaatcccagcactttgggaggcccaggcgggcggatcacgaggtcaggagatcgagaccatcctggctaacacggtgaaaccccatctccactaaaaacacaaaaaattagctgggcgcagtggtgtgcctttgtagtcccatataccggaggctgagacaggagaatggcgtgaacccgtgaggcggagcttgcggtgagccgagattgtgctactgcactccagcctgggtgacagagcgagactctctctcaaaaacaaacaaacaaacaaacaaaaaaacacaacacctgcacagcacaagaaagctgagcatagtaaaacgaggagctttgcctgtgttcttaggagtggaattgctgtgtcatatgggaactctacgtttaaccttgtgactgttagccttagactgccagactgttttccaaagcagctgcaccgcttaaccattcccacccacagtatgggagggttctggtttttccgtgttctcaccaagttgttattggctgtctttttgatgatagccatcccagtggaggtgatttgggcttgcatgtccctgatagctgagtattctgaaacagacattttactgaaatagaacatacattatatgaatgttgaggtggttcaccacagcagtaaaggggaacatagttgggattttctgctggaaaatgatctgcgtatttagagggaccgtgatgagtgtctggaattgtaggtgctgtagatgttgttcccagggctcctgagttaggaggcagtgtggatcctgtggaagagagaggaagacagcttggatttttctagacattgtaattctagttcatttttgactcctggcctctgccactgtctagctagataatggcagcagtaccgacagacagatgtgcagctcatagagcgtgagaaatggcatctgtgagggagacatttctgctaggatacaacgtcctactcttgataccatgatttcttccttagcctcattctgttcgactcccatgttctgtgtgtttctgaatgcctattctcccctccgctgaggtctcccgcctaggaatctgcaggtcacacaggctcttctgcagtggatattaatgcaggccaggaccggagggacttgtttttttgtgtttttttttcttttttttgagacagagtctcactctgtcgcccaggctggagtgcagtggcgcggtctcagctccctgcaagctccgcctcccgggttcacgccattctcctgcctcagcctcccgagtagctgggactacaggcgcccgccaccacgcccggctaattttttgtatttttagttgagacgaaggtttcaccgtgttggccaggctggtctcgatctcctgacctcgtggtccgcccgccccggcctcccaaagggctgggattacgggctgagccaccgcgccgggccagggacttgttttcttccgggtggtttcgcagggctgagctggggcccagcggcggaagtaaaacagcagatttcagcccattataaagagacgtttccaagcgttagagctacgggaagcgaagccccctgccccaggggtgtcagcagagccgtggcgtgcgggtccgtcgggggagacggggggaaggacaggtccccgggagaggagagcgcacccgcttaccgccctggcctcattctgcaggcagccgagagaccgccttcacccacgcggtgagcgccgcgggcgtggtcaacgccatcagccgggcctgcagcgagggcgagctctccacctgcggctgcagccggacggcgcggcccaaggacctgccccgggactggctgtggggcggctgtggggacaacgtggagtacggctaccgcttcgccaaggagtttgtggatgcccgggagcgagagaagaactttgccaaaggatcagaggagcagggccgggtgctcatgaacctgcaaaacaacgaggccggtcgcagggtaagctgggcctccccggcctccccagcactgcagacctagggggctgttcccgggctgtgccaccagccgtggcctggccttcaaggaaacgggttagtctgaccgtgaagattcttacctacgattgcaaatttacatgtccacgttattgaacaaatccttttcaaaatgccccacttcccaatgggcatacgtgctttttcttttcttttcttcttttctttttacttactttattatttcacggttcctagaggacttaggtgcaatgtttggatcagaattccagacgtaaggattagagcagcgctcttgtcttggccacccctcctttgcaacttgaatagataatgcgatgggatgtttaggccgttagacctcatctagggtttatgctctgttaaaggctctggtaatagcagagtcgactttcaagaactgctgtcatacgtatccagaacccagtcaaaaaacacattcaaatactaatgacaaacacacttctgagctaggagattttagacataagtggaagtgtgagaagacagccatctgtttaaggctggaggaaacagcctccccagtctcatgtaatgtgactgtcttttaagcctcagtttcagcagaagcaaccatgcaggtttgaggggagctgggttcattgtatgtgcagagcacacctgggcggcagcttctgggcccctaggtggcatgctggaaagcgtgaaccctctctgcctgcaccttgttcctgaaaaccccccctctgagcacacatccagcctcctcttttctttgctgtcccccatcgtggctgcctctgccacacaagactggagggcctgccccgcaggaatctctgccttttgctgcttctgcatagccagtgttgacagggaccgagggcaacatgggcgtccacccgggtttcctctgagaaaggtctgcggtctgagcactgggtggtgagaggctctttctcctggaaaaagagctctcaggaaacagcacggacttctttcttggagtgttgtccccactcgggtctatgtcaagccagctggctctggttcccaggcgaggtaatgtaacaaagatgaactcactcaaaaatgagaatggtggccgggagcagtggctcatgcctgtaatcccagcgctttgggaggccaaggcaggtggatcacttgaggccaggagttcgagaccagcctgaccaacatggtgaaaccctgtctctactaaaaatacaaaaaattagctggacttggtggcaggcacctgtaatcccagctacttgggaggctgaggcaggagaattgcttgaacctgggaggcggaggctgcagtgagcctagatcacaccattgcactccagcctgggcaacagagcaagactccatctcaaaaaaaaaaaaaaaatgagaatggcaatttcttagaagtttaacggtggcaccctggtgattcagtaacaggatatgaatataagcctcaaaatgtctttacatagcaaaatcttaaaatgtgaactcatgagaggcggggcacggtggctgatgcctgtaatcccaacactttgggaggctgaggcgggtggatcacctgaggtcaggagttcaagaccaggctggccaacatggtgaaaccccatctctagtaaaaatacaaaaagttagctggacgtggtggcacacgcttgtaatcccagctacttgggaggccgaggcaggagaattgcttgagccagaggttgcagtgagccaagatcctgccattgcactccagcctgggcaacagagcgagactctgtctcagaaaaaaatagaaagaaaaaagaaaagaaaaaaaatgtgaactcatatattggagcacatatcaaagaaatggaataggaagtgtcttttgtctgaatggggatgttgtagtattggccggatggaatgtggtgcacctgtgtgcatagcatcatcagccatgggacatcaggtggagaccagagtgggttatatgcccagggtcttccttacgcttcccctatccagaggctatttttgtttcccagaaaagggtgtgtgtaaggtggggtcagtgcgtggtgatgttaggagttctggcaattgctgatctgtgattatgataggctaacccagggcagagagcctggagccatctcagatgacttctgctcagggcgtgtgtggagccacccggtctctcaggtgtcttggctgtctcccagtctatttgcccacgtctttgggtgtctgggcctgaggagtagagatgtcaatgaaggggttaagatccgcactttatctcctgactgcccagagtcgatccagtttttgaaatcttagttgaaacactgccctccccagtccccattgttagtagtttttctcccacctgatcttcaatcgggcattcttgctcttctcaggtattccttactctatctacctttgccttggtaggttggcggtaggttcctgtgggcagggattgccctctctgcccctttgcttcaaccctgtatgtgctgtatgtgggtgggacaaatggatatacacagaggagttccgtgttgcctcctcgggagaggtcagattcacggaggctgcttgtggctctgctgagctgcgctgtggtgtctgcacgtgcctgtgatcaggcaggtgacacccactcttcccctttcccctgctgctgggtctcactttattgcccttaattgtttgttgtcttgtccgggctgttatctggcagccttccctcccatcaggcttgttcctggcttgctcaccttccctgtctgtctccccgcttagccccttccttcaggccccacacctctcctcttccttaactccttatctctccctttgcctctgcctgcttcaggttgggaattcctggccccctttattttttatcctctctccaaggaacaggcctcggccatcagtcaccatctgaggccagaggtattcactgcttgcctcctcacacctacacacaaagttctccagcaaggactgagtgatggctgggatggaaaatagacaagtattttagaaccatattaaaaagaaaaaaagattatccaggatctgatgtcttgacacagagtaaatcttaggctactttgccagaagtttctcttggcctgcaagagcatctagtagctccttcttagacggtggcggcaacaccagtggctgatggtgttttgccactcaaggatttctaagcattttccagataaaagcctggtgcctaatcctgtaacattcctgtctgtcaccaggctcagcacaccattagatagaagtggaagaggagctgagaggcgcttttccagggacagatcgtagaactaaaacttttttctttttttttgagacggagtttcgctcttgttgcccaggctggagtgcaatggcgcgatctcggctcactgcaaacctctgcttcccaggttcaagcgattcttctgcctcagcctccctagtagctgggattacaagcatgtgccaccacgcctgggctaattttgcatttttagtagagacggggtttctccatgttggtcaggctggtcttgaactcccgacctcaggtgatccgcccgccttggcctcctaaagtgctgggattacaggcataagccaccatgcccggcgaactaaaacatttttgaaagctttttttttttttttttttgctttttgaattagcagtctgggctgaaaatcggcatttccccctatcgcctacaaaaggagcctatatatatatatatatatctacaaaaggagattttgtatatatacatatatatatataaaatcagtagtaaaatatgaaaaaaattgcagatattcctatctctacaatgtctttgaattcagggaaggatggagggggtgtttaagctggtgcacttcctcttggatttgttttcctaaaattctggtccttgccctgcagggtcttgctccgactctccttccccaactctgtctgagtgtttgcccctgcaagagatgcttatccgtgctccgagttgctaagtggcaaagtgcacagtttccaacccttaatgtttcctcctctcagcagtgccagacgcctgtcatccatctctaagccaaggaccatttccagaggaatgtcaggctgcagctcagacccagggcatttgggatggaagggtcattgcaggccccatctttgaagtgtctgtcaggatggggtgtcagttcctttatgtcttggacctggagctgcccggctaagtgctggtgcctttaaccttggggagagccttccttcctcctctgctctaagccagctttaagccccgagattggagtggataagtgcttgttattctgagtcctttctgggtggccttggaggttagtgagcctctctagagcttcagtttctccaccataaaatagtgggaataattccgtaccagaaaaaactcaggaagacttttgccaacagtcatatgcactgatgatggctgtgctgtctcttgcacctgcagtggtctctgcttagctctgaataaagacacaatctgggggctcttgaaaagaaatctaagagaaacccttgaaaaatgagtcctgactcagttggtgacaatagccatgcataagaaaatgctctgcagccggcttgcgttttcatcccgccatctgcacgtctaggcctgctgccagggttggttgccatggtgcgtcagcatgctgccgttgaaaagcactctgtaagcagctttctggtctgctcttgcttttacattttgatttgggataactcaagttcaaatctactccacgttgtggcggttctgtgacttctggggtagacttgttttagatgaaccgctcctgcaggcaggcccagctgcttgcagttcccttgcacgttgcttcactgtgttactccagctctcccaagggggcgtctgggggctgctcgggaggaagacggtggtcttgctcacaaatggatggtgtatggcaagactcctgatgactctatggagttagtgactacatggtaacatggggaaagggaccatttaattctcagggtatttgacaggatcagggagagttttgggctaaccacggctatgccagtgatttctgtgataggcttgtgatacaattggattcttttttctgacttgtgctcctattacgcaaaagctggacacattttgttattttgttttgttttgctttgtttctagagatggagtcttgccctgttgcccaggctggagtgcagtggcacaagcatagcttgctgcatcctcaaattcctgggctcaagtgatcctccttcctcagcctccccagtagctgggactacaggcaccagccacagtgcctggctgtattttgttggttattatttatttgtttgaggctttgatcaagatggagatatctttgttttccgattgtgaaaaggatgcattgattgtaacaggttttgaggaatgagaaaccagtagagtagaaagtgaaagtgcctggtgccatcctcccggctgatggggacaagttgccttgccgccccagggttcttttctgtggtgcctcttttatgttttccccctgagcacctgagcatcttggaaagatctttgcatgcatttgaaaagctatctatcccctaccctaccggcccctcctgtgtactaggcctgtggctaccccagccaccctctgggcctcttccaccgggatcctccttcttactgccttctttctcttcccctaggctgtgtataagatggcagacgtagcctgcaaatgccacggcgtctcggggtcctgcagcctcaagacctgctggctgcagctggccgagttccgcaaggtcggggaccggctgaaggagaagtacgacagcgcggccgccatgcgcgtcacccgcaagggccggctggagctggtcaacagccgcttcacccagcccaccccggaggacctggtctatgtggaccccagccccgactactgcctgcgcaacgagagcacgggctccctgggcacgcagggccgcctctgcaacaagacctcggagggcatggatggctgtgagctcatgtgctgcgggcgtggctacaaccagttcaagagcgtgcaggtggagcgctgccactgcaagttccactggtgctgcttcgtcaggtgtaagaagtgcacggagatcgtggaccagtacatctgtaaatagcccggagggcctgctcccggcccccctgcactctgcctcacaaaggtctatattatataaatctatataaatctattttatatttgtataagtaaatgggtgggtgctatacaat

SEQ ID NO: 6 - DNA, 71709 bp, homo sapien
aaatgctccagatcctcagtgttcaagaacctcaggaagcttcgcagtcctgcctcgtgcctgcttgaacagctggatgtgggcaggaggctgtgggagcgggccatgccagcagaatcccgccttactctggggacttactcttgtcacagcccctggtgtcctgagggtcatttcagtgtcatgtgagtattactgtggctattggaaaggatttggtacgagtttatttgagaagttaggagctttttttaaaaaaaaaaattatctttgataaatttagtagaatattttgaaagtactttttggacagtaatgaatgaacaaattgctcctgaactagaaggagggatctaaacacatcatctaagtacaacagtatgtctgaaaaatatctctgcttgtcttttatttgccctttaaagtctgtgcaaacaaatgtgaacagcctcaggactctaagaataatatttttctatggatgtgtatggacagataaacaaaaccccaagggagaaaaaacttctatttaaataaaaataaagatcccctacagctccatcctcctttgctcactgggtttgctgtatttcattttgagataaaagtagtttggatgattaacagttgaacaaaaagaaagtatttgtgtctgtctaaatctatctctatcaatgtaatctatcttatttctctaatcttatctatctgtcttatctatcgacctaactgtccatctggttttgaatattccgtattccagccataagtagtagatcttttgcatccctggggttaatggttccttgagcagacactgacactgtgccgttcgggatcccgtggggaaaacaccctcttcctcactggtcagtgataccctgtgctcacagctctactccccctcggaatctcctgtctgaagcccctgtaggactctgggatcctccgaatcggccctctccagctccaagcacactgggatccttgccgcaggaggttgctgttggcttctgcccatgctgtgggtcaggatctgcagccaacaggcgtgggagcttaggaaggcacctggtggtttctcggtaggaaaatagtgtggagtgtgtgcaatcatgtttgaggaagcgtcatgagagggtcactgtctctgtggtagtgtccttagggaaccgtctttgcctggatcctggggtcaggtttggcatgaactctgaacttcctccctccgcaggatcttcagtagaaaggtcctgtcctgaggaaatgctcagaggcacttctcttgctgaggaagcctgcctggatgtgtgtttttgtcctcatggagatgcacatgacaaattgtgtgcaatgcctcagcacagcccaacaggttttttctgtttacacttaactagcctacgacagcgggaggaaaccttaaatatttccttttcttcccacaaacgctttatctaataaaacaaaattactgcagatgaagcagggagtgatttaaatcgtcatttaaatcaaggacctgatttggtttggcctccctgggggaccttttagcttgtgctatgctgataacgtctctacagactaaaccgaccagagcagaaggcagggtggcagtgcccgtggtggggtggacagcgtgggggccggcagtgtcagtcactgagtgctgggttggcccctcactcctccatatttctgtaccagtaaaataggttgaaactgacatcgagggcagcttcaagaaggtggggagagaccacgagggcagtaatgcagaggctgtcaccctctggagctactgctcggggactgagaaggaattcagtcttgaatacatgttaacctcagttcccgctccttatctggactggctggctcccttctgcgccaagaatctgaagcccagctctgtaaagcagcaattcccaactattttccccctaaaatacacgagacgcactcccatggggcctatctagattgcaggctgcggcacagataaatcaggctgtgggttgggcgcagttcccagtaaaaccccacttctttctctcccactcaagaaagcagacctccatacgcgtaagtgggagatggtgctctgtcgccccagcccttggcgggggactcggcctgtaaaagctgccaaataaatatttactaagtgaaagatagccctgaatccacactaatttgtatttttttaaagtcattcataaactttagcattttaactattagttagtaattaatcccaataaaccggcaggattttgtgattgtgaaactgctgcaatgcgttggtcagcaggaatatttgttagcatttttatgggctcttaaagtcgtcttagctgtgttactgataaagccagccacaggctttatcagtcctgccgttggctgtcagcgctgcctggataaactcctcatccttcccgggaagaaacttctagcaatgcttaagcaggaggccagggaagagagaatcttgatactgcctgctcaccataggccctctgggggcctgccctgtgtggacagatgcttcatttcatgatcgtatacaaatcgagagcaagagtctcctagccgcgctgagcgtggggcacttgccacctcactgctgttggaactctggagttggggccaaaggatgtagcccctcctcgggggagggcagtggggtcaggtgaagattcaagagctcctctttgccttgtcatctagttgtcctattctggaggaattttaaataaggatttaaaaaaaaaaaaggacttatgtattattttaaagagcagccttgaataggcaggcatattttagtaaaaataattttttaaccctgcggtgtgaagactgccagtcaaatacagtgatggtcattatcactcacctgcccccgcccccaggctggaggaaacagagtgcagagttagaatgcttctggagcattcatggctgccgggagatgcccgagaggacgttgagggcagggcagggtgagcagggagctagctcaccttaggagtgcagagaccatcccaagcagggtctgcagacactgacttcaggtgaccaggcatggagatggcaggtgaaacaggtaagtatgccccaaaaatgatgggaaagagtgaactgggatcacttagaaatcggaagcaatacaacaaaggctaaacatatttgagtaggagttcagggtagacacgctcttggatatcaagagcataaacagaggagctaacaaaaacactgcagagaagctccatcgccccctgtagttaccccacctagcgtggctgggagaagctgatacttcttttctccgtggattcaggggcatttcccacctattttaggtatgccagtttgacacaatgaactttagacgtaacatttcataactgcgatataatttccttctgtttttaggccttgaacaaaattttctttaatgggaaagcacacattttatactgaattctaattatgttcatcttgttttttgaattatttagctacctctaatagagagtctgaaagatgattacattccacagtactaacattttcaatggccctgaaagacgtgagatgcattgctgctactattttatcaaattattgtttctaaaatgctgttttactcttctagtaggaagagtgacttttaaaacaatggatattggctgggcgtggtggctcacacctgtattcccagcactttgggaggccgaggtgggtggatcacctgagatcaggaatttgagaccagtgtggtcaacatggtgaaaccccatatctactaaaaatacaaaaattagccaggcatgatgacaggcgcctgtaattccagccacttgggaggctgaggcaggagaatacttgaacctgaaggcagaggttgcagtgagccgagatcgcgccactgcactccagcctgggtgacagagcaagacgccgtctctaaaataaaataaaacaatggatagtttgtccaacatggtatgttaaaagcgcagagaagctgaagaatgatgatgaagactaaaataacgatgataagcaaagaactaagcaggcatctgtgcagtgattcaggaggggtgtccatgaggggcggcttcggagcagctctccctgtaacttatctcacagttccctcctcctttaaggagtcagaccacggtgggctttgctttagagacatgccactgtgtgctttgttgctcgtgactatcccttcacctttctagaggtgctcgtcttcatgtaaagtcgggtgaagctttttcactcctggagaaaagctcttacaacatttttgggacaaggagcaggtgtgcctcagcgagcctgtcattatctggggagggggctccagataacacacttctacttgctttctttagggaaacgacatggtctcctcctgtaacactccccaaaagaagtatgaaagccgacataaaatacgaatatgatctttgcattaagtattaaatataataccttcaatgtagtatttgtgcttctctctatccagttctcagttgtttagggatcttctgagggcaaaccaaaaatgtcagtaaagcaaaaatatatcaataaggcatcatactgacgaaaacaaaaccagaggttttaaaaaataatctgggccgggcacggtggctcacgcctgtaatcccagcactttgggaggctgaggtgggtggatcacctgaggtcaggagttcaagaccagctatggtcaacatggtgaaaccccgtctctactaaaacacaaaaattagccgggcatgatggcgcacacctgtaatcccagctactcgagaggctgaggtgggagaatcgcttgaggggagtgggaggttgcagtgagccgagatcgcaccattgcactccagtctcggtgatagggtgagactccatttaaaaaaaaaaaaaaatgtagttatcaattttttgtttttgaccaaaagtatttcaggaactttgaagaaaggacctgaaaattattactcaggctggtatttagtttgctgacttttaactctcagagctgaacagtctaatccttgatcattccagagtgagtttaggaatttgtagtcatttcctttttactgggtatttgcatacatcactaaccagctgggattagaatgagcagtctctcgatgctgaaatggaatgatgagaactcagggccagcctgaaatgttcatcctcatcgattaatccttaatgaacactcatgcatagatgacatcaaagaaggtcctttgcaatgtacagggaagacaaaccagcttccatagtgtacattcttaaaggaaggttccaatagaccgatacacatagttaacattttgtatttttatccatgttttgccccaagattaaacattaggagtaacgtggacatttgctcagtgtcgagggaagggtcagtgcatataactaggaagaaggctatctggcagggttgggaacgtgacctcttgccctccaaagcctgggatgctgaagtgaatgcctccaatcttgcggtgtatggacacagagcgaacgctgccctctgaatacagaccagaggttagaggttaatgaatgggtgctctctccacactcaggatcccgttcaatagcggttttataaataagggcttaaatggggtcagaaaaggacctgcatattgcttccaaactctctacatctttttgaagcaatagtgttcacagatgacatccttccacctgggaagacagagatgaagctcttgtgcttggagaactggacggctactcctggctcagtgtgtctaaaaacaggaccaaatggaaaacatagtggggggggaggtccttgctgccccctattcttctctagtaatcccttaaaaaataattgcggacccaaacctctggcctccagcacattttccacttgattagaggcctttgtgaggtggggaaagggacctgcagacttgtgtattgtgctggggcctgaaatgtccagctgggattttttcccatcaaaaggggattttagtaaaaccattatcaggggcttagaggagaaaagctgttgagctgcaagtgagggggcagattagcattagcgggcttgcttctggccccagtggaggagcgggaaggtgtttgcagccacttgcacacaagttccttagtttctctgcaagttcctggcaggtgcagaggtaggaatgaatacaggagtgggaactaacaggcttgaacaatggcacagggaggctttatctctgaagtatcaagcggaaggcagcccaaatcaggaaggactgcaaggtgttgttgatacctgcttcagtgtgtagacggccgtgggactggcctcattgctgttatgtgtggccacgtcgcctggaatcccccacccacaacactcgacccctctcgacagtcttcatagacggcgacaggaaattcagaaactgggaaatggccatgctggagtcctttaatgggcgaatggacacctttagggtggggggtgggtgtgctggtagcagctaaaagagtacagaggaaggttaggaaagcagcagcagtggctgtcagcctgcaaatcagtgtccgggctgtgtggatttgcagactgagccacgggaacctcctggggagagggtttggggaaggtcccctacaagagaaacgtgcatcatcttgggattactggagccctcagctataccttcctctgcaaaacggagcacagaaactggagtcacgtggtttggatggagaatgttgaagccaatagagtaattgctgcctgaagggcccatgtgaggaatgtcggagccggcctgtcccggaaatgctttttcctatgtgtcctctgtacactgttgctctagcttcccggcagaaatggggtgtggatgaaaacaacgttggtcctgacggctgtgagcacagaactagagtgacagccacatgcctcccgtaggacattttcaggcttgcagtgctgccacctcagaggtctcagtcacaccaacatcctcacgccagcccagtggccacattcgcaagagatttgtctagagtcaaattcaaaggttgtttctgtggttacagaaagagggcctaccttcttgaaaatgaagcccagggccgggcctggtgactcacgtgtgtaatcccagcactttgggaggctgaggcgggtagatcacctgaggtcaggagttcaagacctgcctggccaacatggcaaaaccctgtctctactaaaaaatacaaaaattagccaggcatggtggcacgtgcctgtagtcccaactactcaggaggctgaggcaggagcattgcttgaacccggggagcagaagttgcagtgagctgagattgcaccactgcattccagcctgagcaacagagtgactctgtcgaaagaaaaggaaggaaggaaggaaggaaggaaggaaaggaaagaaggaaaagaaagaaaagaaaggaagaaaaggaagaaagaaagagaaagaagaaagaaaaagagaaagaaagaaagaaaaagaaaagaaaagaaagagaaagaaaacggagtccaggaaagctgttcttggaggctatgaatcaaggagcagccctcccagttcttccgaggagcagctttaggaactgctggtcctcagcgttcacacattcccctcactcagttctcattctggctcctcagccagccccgttttcttcttcttggctttgtgcagggtgatacgtgtttgcttttctttcctttacaacctgtattctctgtttggggtgccttccctgaatctgtattctttcagtgtagtcactaagaatggcatatttcagctattactttccaaaagttgcgcagggagatgttctgctttcataagaccttcacggatggtgccaggaatgaatgtaatttgccttatgcacaggccccaagtccctgaaacttttccttttttatttattctctaaccaaaaatgacgtctatattacagagcttataagctgtggctcctctagccaatacagcttggtagaagcatctgcaggggataactgcctccaccttttttcccacttctacacctgcccttcccactcacagtttgattccccgaggccaggctgttgagtaccaggagggcaagacccgaaggcctctcctgccctcagcctgtctcttcttgtgccattctacggaatctggctacattggctcagaagttatttttgtaagttctgctaccttgtcctaatgtcagttttctgtaggaggaatttaggtcacacaagcaactttacttcttcgtcagggctgttattattttcatcttcatagactctcttatattttatgaagatgtcttcatctgggcaataaagatactccttttaataaaaattaaaaaaaattaaaaaaaagatactcctaaaattttaaaatgttttttcctgaaaggctctctagaatttgtcctcacagatacacttctgatttttcttttgtaataaaaaaaactagctctttttcttgctgtttaaattgatacctccatgtatgactaaaatttttcccattttcttcctcccaaactccccagatatggcaatctaagaaggatttgtatgaagtgccctttaagaagaattagaagtttaaagagaaaaaaaaaaaagcattagaagttaatgtttgattctcttagctccaaaagcagagagctgcaaaataacacctggctctggggagtaacctcactgatattttaaaattcaatttcatcttttccaggaagtgaaattcctcatttgtcaactcttacgcctggaggaaatactttgcgggtgcgggtgaaagagaaaggaccagaggggatttgttagatgggaggaggttgtggttccccttgggaaatagcttccaactcacagacaatgctgccacctactgacaagaccaagacatgggacgtgcagacttcgtggatttctccactttctgtcttccacagtggaggacatttagttttgcattaaccatactttattgtactaccttatattggaccctaaaatcatgttcataaacttggggtaaagaaaaacacaaggtcggactcctagttttaataactccaggacaggtgtggatatgattcacagctgcttcacaatggggaaggtaaattgtgtgtaagagggttttttgttgtttttttaaagggctggggaggctgaagcaacagtccagaaggagacaataacagttttccagccctacctttcaataatgtgtagtgcttgacttttacctcttaacccacatatgcacatttttatttctaaagaaagcagttgtaggctcctgcaatctcagcactttgggaggccgagatgggaggatcacttgagcccaggagttggagaccagcctaggcagcatagcgagaccctgtctctacaaaaaaaaaataataatagtaataatgggcatggtggcacatgcctgtggtcccagctactcgggaggctgaggtgggaggattgcttgagctcaggaagtcgaggctgcagtgagatatgatcacaccgctgcacttcagcctgggtgacagagcgagaccccaactctaaaaatcaataaagcagggatgaagctgtttgctgctaaatcctgtgtcctacgttaatgagtttctgcagttccccttgtgattccattgaaaattagacccttctgtgtagggaagagagaggccagctgccttcctgggggtcatgctgttctgattgttgacatctgaccctgagcacaatggcagggcatctgtctcaagtgcacagacatcagctagggctggaagagccaatcctccatctactccaggctctggaaacttgaagaccttttctgcttcgtacaaccgtcagctgtcagctggatgaagttcagggggccacagaacttaaccatcctgcttttacagattcctgaaaactggctaaattctgtgcatctgaagtaaattaggaaaggtagaaattgtcactttcatcttgtcattttcgtgttgtttgcttaagacacacgtactggccatcttgtcgttgttgttgttcacagcagtggagttttgggcaatgaagttaaggtttaaattactgaaagcagaaatgcttgtcttccatctgagaacatgaagcatttatttgaggggcgtttgcgggcttaactgttacaatttctcccttactttactcatgtgtccaattttagcctcagtgattgttctagagattctcagaaatagcaggactaatttttttggctcctccctgtttagtgactacgtctcagaaagccttgccttgggctagaaaaaggtagcagatgtgtggccgggcgcggtggctcacgcctgtcatcccagcactttgggaggccgaggcaggcggatcacaaggtcaggagatcgagaccatcctgactaacatggtgaaaccccgtctctactaaaaatacaaaaaattagccgggcgtggtggcaggtgcctgtggtccccgctactcgggaggctgagccaggagaatggcgtgaacccgggaggcagagcttgcagtgagccaagattgtgccactgtactccagcctgggcgacagagcgagactccgtctcaaaaaaaaaaaaaaaatgtagcagacgtgtatgtaaataatgctagtttgaggccaagatttcctaaggagaaatattatgaaccttggtaggaaatatttcctcatatcctttttagatgagaaaaacaatgttttccaagccatagtaattccacattaatatttatgaaaaattaatgtggtctcaactgttttcccacagtccagttccagtgtctcagatccatgatgtaaggagtaattgttgacaccccactgtgtggtaggtctgatccttctggagtgtggattacgtaaatgggggagtaataaatataagaaggtgcctagtattaacaaattagacccttttactctttctggacaagtgggatttgtaactaaaacatctgtgaagtcaagcctttttgcccttgaatgaagagaaaatagctagagtttttgcaacttgattctactttataaaaggattgtgtggcaggtatttatagcatgtgaaatatgtgtgagttcctagctttgaagctctcatgagcatgtacttccagcattagtattctgcattactatgtgcaacaaagcagtgttttggaaactggctcaaatcctctgagagcaacaggcaacagatttgacagttagctacttcagtaccttatagaccatttaacaacatgtactagttttttggtttcctgaataaccctatataatgcttgcaaacatgtctaagtttgcataaggtagtgcatattaaatagtaataacttttagcatttggggttttttttttttttttactcctaatgaaaataatatgctttggtgtggcaccttttaagaaacttttttttaaggctgaggtagaaagatcccttgagcccagaagtccgagattgtagtgagctctgatcatgccactgcactccagcctgggcaacagagcgagactctgtctcaaaaaaaagacaaaaaataataatttttttaagagatggggttttgctgtgtcgcccaggctggtcttgaactcgtgtgttcaagtgatcctcccacctcagccgagtgagtagctgggactacagatgtgtgccgtgcctggcttggtgccacacatctctgaagagagacagggtggtgctttgcagtgcccctgtgagccgcctccatgctggtcaccttctgcattggtcattaagtctagagcagcccaggttctgacactaggttctcctctaattacctaggcaaaatcttttccactttgttaagcatcttttcccatttataaaattaaatgtaccacatctgccagatttgggaaaacaaaaatgttgagacagagaaaccgaacattgtgttatgactgagttcttccacagatcacactcacattcctgacctggtctcacttgggtttctctgctgcgccacggctgcagacccagttctcttctttgtaattgagactcatttgtttccactatcacaaatgcaagtatccttgtaagttttttataaggatataaagcatttgttccttaaacaactaaagtggccgggcgcggtggctcatgcctgtaatcccagcactttgggaggccgaggcgggcggatcacttgaggtcgggagtttgagaccagcctgaccaacatggagaaaccccgtctctaccaaagatacaaaattagccgggcgtggtggcacacgcctgtaatcccagctactcaggagactggggcaggagaatcacttgaacctgggaggcggaggttgcagggagccaagatcgtgccattgcactgcagcctggacaacaagagtgaaactccgtctccgtctcaaaaaaaaaaaaaaaaaaaaattgaagtagaagagtaatgaaataatagaaacttaagtcttctttttaaagaaaatatgtgcacttttctgggttaataaatagcaggcagaggaattccacttcgattgttttattgggagtgggggtttaacataccccactctggtgctgctcagttaagatctcaagcttactttcttttgcacctcaactggagggcttggctttacatacgaccaaatattctgggttggtaaaggcaactccagcaggcaaaatcagagcaatccctggaaaagaggaaaaaactgaaactgatcatttgtggacatttaaatttaccaattgtctagaaattccatacaagagctgagatatatgctcttgttccaactgtgcacttacctttgatacttcattaagtaaattattaatatttggcactgatctaaatatgcatgtcccatctgttttacaactttttaaaaaatttaacttgctgcctgatagttaaccaagtgcattgacagaaatgaggtaagtatgtgacccaagtctgagcttaggtttgaatgcagctttctaatttctaatgctgtgctttactcatgatccacattatttcatcaaaaagcctcacccctctgactcctcaggggttcataatggcacaaaatttaggtcttgccctctactaaagggatggaattaacttttaaaaggggtgatgtttgatgcagggaagagaaagagaacagagagaggggaccactagatgacttactatagtccctccctttctaccgcagaacacagcagagatcagaggccagggctttccctttcatagaactgggaagagacagttgtcagaagctgcatgaggtcttggttttgttttacaaatctgatcttttaatcaagaggttcttattctttagaaacacagtggtccctgggggccactaccctttccctttgaaaacttgaattcgaattctctaagtcaaaagtgaaaggttttgtttgtattctaagaccagcacctatctagtaaccacttcaggaaagcagcaggatttgggagctaggccatgctttaatttacatatcatatgtccttatgtaagagaaagttcatacctttcaaaagaaaaaggaacgtttgcttttttacatctttgttgttcatctgactcatgaaagaacatgatcggttcgagtttatttttaggatatactggtactggcttttagttttagtaaatgttaagttggacaagttaggggcctagcttgggagctgcagaaattggctgagccccacaggtgatttatagataatctttccagtaagaacattgaagggctacacacaatgacacttagaaaaagaagggaaatgaagctgttccttgactactacccagtttctgttgaggtttattacttctagatgataaggtttacacgaagtttacattatgttttttcagttctcaagtttcagcaaatacctgaaccaagtttttttctgttattctaagaactgccctggagtgccttttaacttttgtaccaccacgcaaagtgtactatcaattcatgtcctttagctcttctattcttcaatgcatttctcccattcctgtaggtatggcggggatcaacttttcataccaccaagagtcacccctattccctttgaagtactgccctatggcataagcttgttcatacggtgttcaaacagctaccgttcacttctatgagggtcaccttactggaaaccaaggtatgacgagtaactaaatcttctcatcaagcagaagggagctggactttagaaatggagcctgggccacgcagagtggctcacgcctgtaatcccaggactttgggaggccgaggtgggcagatcgcttgagcccaggagtttgagaccagcctgggcaacatggtgaaaccctgtttctacaaaaaaaatacaaaaaaaaaaaaaaatagccagccatggtggtgtgcgcctgtagtctcagctactcaggaggctaggtgggaggatcacttgaacctgggaagtcaaggctgcagtgggttgtgattgtaccactgcactcctgcctaggcaacagatcaagaccttgtctcaaaaaaaaaaaaaaaaaaaaaagatcaagaccttgtctcaaaaaaaaaaaaaaaaaaagacaggaaggcaggaagacaggaaggaagggagggagggagggagggaaatggagaaatggagcctaggtttgaatcctggctccctcacttactggttgggtaacttacggcaggaattatgacttatctggaaaacagggataatacctgtttcagcaggttgctttgaagattaaaacttacaagtaccttgtaaaacacacataggttctcaacacgttaattgctttccatccaaaaaggttgagagatgagcagttgaccttcactaaccactctaggtggtttatcatctttcccagagaagctccggctatatactaagtatgcctcattcaggataaggatatagctagacccatggtcgtaactttcaaacatcaatttgccgacctttagtcaagcgtatatttaacatttaacgtaaaaaggagacaaaacagaagaacgtgcttcacgttacaggtggtaggaatattttgcctattaaaatgaagaatgtgaatacagagcctaagacttgggtgctcaaatttttatcaattgaatctgtacagccatgcagtctcttggaagaaaaacagactaagaacccactgccgtgtaaccttcaggagttgtgtcaaatgctggattagaaagctgaccctaattcagagtccctacttcttaataggcttcacacttttttttttttccaggcattaagcactgtaacctaagtgggaagaaagagatccacaccttccccaaagaaacagaagatggatctagtgtcaggctcaattagacccaattgtgatgactctccaaaaaggaacaatgcggcttttgtgatatgctcaggcagaaagcttggacattttacaaaacaatcttatcccaagagaaacctgggttccagccctcttcctggaaagaggggttgatccaggaaagttttatactactcttatcagctcttgctgagatcagtattttttttaacaatctcagaaacaacccagaccaatgtgaaaccaggaatatgaaccactcccctgttggagcactcacacccataggtctccacagccaaaccacagggtgtcagattattttgttactgtctaccaaagggaactcttgctggaattctggtatttcattaatctgccccgatttcagtctaaaaacccttgacagagtggatccagcggccagcctcggctattggaagtgctaaaatgcaaatgtgcaaaatcctggccaagctccccatcccccaggaaagtgcttccttacagccgggcctggaggggaatgtgaaaaagagggcttgagctgccctcctcctctccacccggaccctcgctcacactgggagattcagtatgcatgactgagccggcaagcacgcaaggacagcgctcttttaacttttctcaacaatggcttcagtccttccaccttcacatcctccccacacccactctcagggtaaaaaaaatccatctttcttgcccacgtcgtgaaccacttttcaacatcacctctagatctcattttcacccaaagaaaaactggccactcggggaaactgtgacttacatacaaatctggttttttaaaaagtttcattttgttcaatttctttaaatttccacgttgttgaaagtttaaagccaaacattatataaatctccagtctaatcacatttctagaaacaaaacatgtcagtagtaaaccttatacagaataaaattctacccatgagttgactcacccccacataggatgcaccaaactccaccttgcgtcctcttagagtatacaaacaacacctcctaccttggcatgtacccaagcacacaatgccttaaaaataattcgcagatacaaggctgttgttttttttttttttttcaaaaacatacttcatatttcctcttttattatataaatatcagtttaaccttttactgtaagaatataaacgttttaagaggatctttgttattatttatacaaattcacaaacagtacaattaattgataaaggtctctgggtttctttaactccatggtcttgcatgttgctgtggagggttctaaagaaataacaacaaaaatccaacgaaaatatacatcctactcagaagtgatttctttaaagccacaagtcccaacccccaccaaaagaaagaaagtcatctattcctccatttagaaacggaattttttaaaacccacaaactcccattttgttaatagaacagagataagatatgagcttcatcacagccccaggggctctgcaggccagctctgctcctgtttcccacaggaagccgcactgtgtgacctttttggggggaaacttggaagagggtgagggtagggcagaatttgcatatataatcatcattttcaagacacaatctgcatctccaacaaaaacaacggttcaactctcattgctcccacatatttgtgctataaattaagatttagaaataggtcctcaaatcccaatgaacaaggagaaaaaggaaattatagccagaatgtggaagtggggcacactggacggatggaggctgggaagaagccaacacaaaaagacggacaaacccaagggcatctttccagtctaggcacaaacatgtttcagtctcaaaatatctctcttgtagaattccagggcttcagaaaaaaagtaaactaaaacgaggtagccagacatatatatgtatatatatatatatataatttatatatatataatatatagaatatattcagcagaaaaaaggaccatgatttcaaattttttccaaaaaaaaatttttaaacaggaaagaagattaagaacatgaaatgagcatgaatagcagagtactgtaagaggaggagtgatgagaagagactgggattagttacaaagtggaagggtgaaaaggcctttgtagctgggtttgctttttatacatttcaaaataaaaaccagatcacagtattcaaatgaaagctgaagtgaaagcagacattttcctcaactccccagggttgaaaagaccagtcactccccacccccatttccagtcacagcagtggggatacagtagctgaatcagtcctccaccccctgcaggggagtgggtgggtaagcagcagagtccatctctccatccgcggggaaaaggagctgggagtagggtagggtaggaaccccagctgcaaagagaatgggctggaagccgggagggggctggaggagggaggaggaaacgagcctgaggcttctgtcatagccccatctcatccgctgcaatgatctgtgcgtaagtgtgcgtgtgagtgtgtgggggcggtggtaatgggaggatgaacagggcgggacaaggggagctggtgctgccgccctcacctgaccttctcactgtccgtcatctgccagagtcccaggttgagtaccttgaggcacggcagctgcgtgatgcgctccaggccgcgcttggtgattcgggtgcagccgtacaggtctatgccggtgagttggctcaggtgctcagcgatcagctccaggcccttgtccgtgatgcgcacacactgtccaatgttgagcgtgcgcagcccgtgcatctgccgcaccatgcggttgatgccatcatcactgatgtggcaggagcagagggagagagacttgaggccatccagcccctgggctatgtaagccagactctggtctcccaccttgtcacagaacgaaacatccagccccgagaggcgcaggctgcccatggccagatgcatgatgcccgtgtcactgatgttgtcacaggagcgcaggttgaggctgcgcaggctgcccatgtgcgacaggtgcaggaggccagcgtccgagattcccccacagaagctgaggttgaggagcctcaggcccgtcagccctcgggagatgtgctttagagaaagatctgtgagcttctggcagtcctgtagcgtgagctgctccaggcccaggcagccctccgccgcgctgcgcgtcatgccggccaggtgcccgatgcccacatccgaaaggtggcggcagctgcggaggttaaggctcttgaggcgctgcagaccccaggcgatgagcagaaggccagtgttggtgatgttgctgcaacctcccagctccagcacctccaggcccttgaggtactgggctatgcggcccaggctgctgtcagtgatctgcttgcagaggctcaggttgagagcgcgcagggagccgatctcctgcacaaacgcgtggcccagcccgttgtcggtgaggttgtagcagccgctgaggttgaggctctcgatgttggccatgccctggatcacgtagctgaggctgcggcggaggctcaggatctgcacccggcggatgccccgggcctgcaggctggggaacagcgacgggttggcccggcgcaggtgcagcttggcctccaccccccgccacaccgacttgtggtaggcggcgtcccgccaggcggtgcacacctgcgccgcgcgccccttgtcccggacgtccaggtagccgaagatcatggccagcagctccgggaacaggcatgagatgtgggtctccatcttcctcctcccccctccgcggcgctggggggaggaggcgcgggccccgccgctccggcctcgggcaggcgacgagagcgcttctccccagccgccgccgccgccgccgccgccgcctcgggcccaacggccggcccctccccgccttccggctccggccgccgccgccgctcctcctcctggtccgtccgtccttccttcctgccggctgcgcctccggcccggccctcccccgccccgggctccgcacggcgctcacatcccgggcggggaaggcgcctcgctctcgctcccggaggccggccgccgccgccgcctcggctctacccacgccgcgcccgggccgcgccgctccgcccgcgccgccgcgcccacgccccctgccgcatcctccgcctcctgccgccgccgctgctccgcgggccggcgggcggcgagggggccccgggggccgggcgcacgggctccgggcgcggaggaggcttcctgctgcctttgtctctcgcccgcttttcaaacctcccagccccgggccgcccgcactccgccgcccaggcggggggaccaggaggccaatcccggccggcggcgtgcgttccttctcccccgccgtccgcggccacttgggagctgccggcccccgcaccaaggacgccgcggccgtccggccggagcgcggctcggcgcagaccccgggcgagcaggcgggccgtgcgtttggtagcgcccgggccggccccggctccgccgccctgcagcgcgtcccctccgccgctcccgctcccccgcgcccgcgcaatggtacgggcctgcgctgccggaactgtggagccgttgccctggaaaccgagttcggcctggtcccgtggcccctgatttttaaccctgtgggcgccacgggggagcggcagctgtcagcagagcgcctccccacccggcttcttttcacccggtagcccgttattgagccgttccctctctgggccacgccccagccccgttccttctttttctttgctgttgaagtctgcgcagccccttcccacagtttacccctgcaattcgttacccttatttcacacccctctcccttgattatccctgcgagagccgcctcctatagcagtgctcaataatcgtcaccccaactctccttttcttactgtccctaatgccccttaacgcctcattatcacaccccctgctcccccggttggggctgtttactacgacgcctttctctccagtcttgtgtcttaaattggagagaaactcggctgtactcatcttaaacaatgaccccctccagtcggtgttctagaaatttctagaattatccatgactacttccttctagcatcttctgatggtttccagacacgctgtgtgtgtttccctcggtacttgatacatcaaaacttccctctacttctgaacgctgctgcgccaccaatgccctcagtccgctttgcttacaggggaacagccttcccctaagccttgttttaggagctttctccttgtcatcagccttagactatcagttgtatggctcagttgtactgatagtcaatatattcgtatatgctgaatccaatttactttttgattaaaatggaatgacagttgaacttggtttaagacaatccagtcgtgtctgttggtttatcaaccgttttatggaagcagggcacaattccattctaggatgtagcccctgggtcctaaatgtccgtactaaggatagaatttcagaagtttcattttaactacccccaaaccaagaatttttggatcagagaaaatgatcctctgtattttaatttatggatccacacaactagatacaagaccagcggatttatcagaaagggaaaatggtttcattgattctttgaggacctgaacaagatttggaaggggttccatattcagtgtaggagagtaacttttgcccaagcaaccactattagaccaaatacatacagattcagtaataggcataatacaccttttacacccctaccactcctctttcctaaatcaggaaatgcagaagcaaaaattctcgccagcttgttacctcacccacattacacgcagtgtggagcccatagatttttataaccttcttgaaaaaatagactgtactgttagtcatccagtacatccagatgtacggtggcagtaagtgtcacgattctggggtatgcctgggcttcactcttctcctggaggttatctaggcttttattcttctcagtcacttctgcctaaacgtttaccttaaattctgcgcaaaagtcactttttgattgttctgtgcacctagatgtgtttgggttgatgtcaaggccttaatccaaagcaccttagtgtaacttaatcctgcttaataaaaaacaaagtaccccacacatttggggggaattttagacaaggggcctgaccagcctcggactaagaaggagcctaatggttttccttctctagaaaggcccttgttctcaaatctgaagagtcattcagaggtatctggaagcactttctctagaagttggccatctggtcctcgttctaacaacagtttttcttgaattctagaatcttattaacacaaagccttttatttaaggcactcaagtatatattataaggattttcagcaatatgactattttcaccttcaataaataggaaaatatagcatcaagaagcatcacagaaaaagcattcccggggaaaaggaactagggcgtagaatgagccctatgccgaatctgaacacctggtgactttatgctactgaggaaacgactctcctttctgggtctcggtttccttgtgtaacaccaggatgatttgactaggtaatcttcagggacctttccagtaggaacactctgaggccaagagcctagcatactgtctccttaacccatggaacaattacacattgttcctaatgcaggctccagatattaagaataacttcgaatacaataacttcctgggagctttggtttatgctcagacttaggacacaaaaatatatgaagaatatgtatagacaggagactctgattgtctggcaaagatgtataccaatgtagaaaatcctgtggcttgctcttcatatttttaaaactggttgagatttttgtatatgatttaacaagttgcaaccataagttttttaactagcctatttaaaagcagaaatgatagccttgtgtagggagtctctccaaagccttacaaagaattttttttttaattctagatttttcagatggaatgtgcttttcacctgggtagggtgggaaaattgagaggcccaacccaaagatcaggcttacctaaggattcatactttctccttcagaaggggaagacctggcaggaaagatcagaagagctctgtagcttttaactcctcattcaagtatatatatatatatatatatatatatatatatatatatatatatatatatctccaaaaatagtggcccagagtctagtttatgggttgggtcagaggagttaacataggccgggcaaagtggctcatgcctctaatcccagcattttgggaggccgaggcgggatgatcacttgaggccaggagttcgagaccagcctggccaacatggtgaaaccccgtctctactaaaaaaaatacgaaaatattagccgggcatggcagcacatgcctgtaatcccagctactcgggaggctgaggcatgagaatcgcatgaacccaggagacagaggttgcagtgagctggtactgtgccactacactccagcctgggcgacagagcaagagaccttgtcaaaaaaaaaaaaaagttaaaatattttgtgtctattttccttgaactctagtgtatctatggcacaatgcctgctatgtagtagacattttgtcagtgttgttgaactgaagtgaatgagatggataatataaataataatctctttatgaaagacttcatacatatcgaaacttcttcgagagttctgggcagccattagtaatctgaggtttataataaaatgctgcctttccaacttcaaggtttcttgagagtaacattcattctgttgctcagtatttctaagtaggagagcatctctctcgacacttcttcgtgacagaatattaaagataagagagggtgaggatttgattcactgattgcaaataaaagatttaagcagaaacaacaaccaaaaaaagcccaatttaaaaatgggcaaagggtttaaatagacatttctccaaagaagatacacaggtgatccacagcacatgaagagaggctcaacatcattagtcattagggaaatgcaaatggaagccacagtaagataccacctcatatccataaggatagctactattaataaaacagaaaataacaagtataggtgaggatctggagaaagtagaatcctggtgcactgtgggtgagaatgtaaagttgtgggccaggcacagtggctcacacctgtaattccagtgctttgggagactgaagcgggaggattgcttgagcccaggagttcaagatcagcctgggcaacatggcaagaccccatctctcttataaaaaattgtgcagctgctatggaaaacggtatggccatttctcaaaaaattaaaaatagagctaccgtatgattcagcaattctgtttctaggtatgtacctaaaagaattgaaagcaggggttcgaagagctatttgtacatccatgttcatagtaatgatattcgtaataccaaaagttagaagcaacccgaatgtctattgacaaatgaatggataaacaaatcatggtatatactcacaagggaatattattcagccttgaaaaggaaggagattctgacacatagtgagacatggatgaaccttaaggacactgtgctaagttagtaagccagtcacaaaaggagaaatactgtacaattccacttatatgaggtatctagagtagtcagaattatagaaacagaaaaaataatcattgctaggggctggggagagggctgatgcagaatggggagttgtttaatggatatagagtttcagttttacaagatggaaaagttctgaaaattggttgcacaatattgtgaatatacctaacacttctgagctatgcacttaaagatggaccaggcgcggtggctcacgcctgtaatcccagcgctttgggaggctgaggcgggcagatcacctgaggtcaggagttcgagaccaacctgaccaacatggagaaacctcgtctctactgaaaatacaaaattaggcgggcgtggtggctcacacctgtaatcccagcactttgggaggctgaggcaggcagatcccctgaggtcaggagtttgaggccagcctgaccaacatggagaaacctcgtctctactaaaaatacaaaattagccgagtgtggtggcacatgcctgtaatcccagctactcgggaggctgaggcaggagaatcacttaaacccgggaggtggaggttgcggtgagccaagatcgtgccattgcattgcagcctgggcaataagagcaaaacttcgtctaaaaaaaccaaaaccaaacaaacaaaaaaaggttaagatgacaaattttacgttgtgtgtactttacaattaaaaatttaaaaaagattttagcaggacaaacattttgaaataaagatagaaaaaaagagagaaaaataggtgaaaagtattcttacatcaacagattgccgggaaccccctgagatatttgagatgttcccccaaattattagcttgctgtatcttgtaaatgtaggcttaggatcatctttatccactaccgtaaaaataagggcttgtgatctgggtagccagagccttcccgtgagggtgaatgtgtgctatattgtccacactgggaaacccacggaggtgaaagggggtgctgtactattagtattcacgcccgatggatggtcacgcccttttactcttgaaatcgggttgccatttgtaatttgttatttgcagcttttgagtgttaactataataggtgtttttgtagtttcaggcacccaaccaaagaatcagaaatacggtaatagaataatctcagatatcaggtattgtttgttcaatgttgacaaacaccttaggtacttgttacaaaacaggtagatagaacaactctaggaaaataaagtgtgttgtaaatgtagccatttccaggtcaccgaacacttagaaagacgggttttcaatttattcaatcattcaggctgggcagggtggctgtaatcccagcactctgggaggccagggtgggaggattgcttgatcccaagagtttgagaccagcctaggcaacatagcaaggtcccatctctacaagaaataaaaataaaaataattagccaggcgtgatggcatgcacctgtagtcccagctagtcaggaggctgaggcaagcgggaagaccgctgggccaggaggtcaaggctgcagtgaactgtgcttgcccccctgcactccagcttgggtgacagagccagaccatctctcgagaaaaaaaattcaggaaaatattaatacaaattatatacattgctctgtgctatgaaataaacaaagatgtagaagattacgtttttgcctttaagaacttgggatccagcaggtgagctagaaaatacctgtgacagtgacagtatttgttagtgttataagtgccagcagagtgatagaaataaagttctcagtttggaggatccatagtgaaacctagaatttgaataggtgttgatgggaagaatgtcattacattatagtggaaatttttttagagaataggctgaagttttatattgtttagaaaaaaataagaacattacaatagcaaccatgtattgtcatacattgttatggatcttccatattgaggcatcagttaatctaaaaaatctaaaaaatcactttcctaaagaattcttggcttttatttttcccaagaataagagatctggctgggcacggtggatcattcctgtaatcccagcatttggggaggctgaggtgggaggatcacttgagcccaagagttcgagatcagcctgggcaacacagggagaccctatccctacaaaattaaatttaaaaaattagccagacacagtggtgcgcacctgtagtcccagctattcacgaggctgaggtaggaggatagtttgagcccaggaggtcgaggctgcagtgagccgtgatcacaccagtgcactccagcctgggtaacagagagagagaggagagagagaaaaaagagaaacctttaactcttatgtatctggaattggaaattcagtatctgaagtcagaaaattttaattcatggtctggactttgcaactgtttttacaaccgagattgcctcaaaaaaaaaatttgttttagtcagctctctcctcatttgccccattcttctctctaacaatagaaccagacaaggatggaaaaagagggaagttcagggtgtcctgcctgtggcgtccacgtgtgactctcccctacgtgcccgtgctttctgttcccattcccgtgagctgcgttcacaccatacttggagtctgaagctgtgtgtttgaatccttgccctcccactgtagtctgttgcctgacctatggcaaagtcactcaattctttgagcttcaatttcctcatctataaaacgaaagtgattgtcgttcacggagctgtggtgagatgcgttaagaaaacatccacgagaaaggaagggcctagtgcatgcccggcacatagtagggacctagtaaatgctgtttttgtttttttcttgtataaagatgcactttgaaaaagaaaaaaaaaaacccttacagatgtgcctcagaattatacagatgtacatttactgacagtgacacttttttaaaactgtacttcctgttttaaagaaatgtgcaggttcgaagctgggcgcagtggctcatgcctgtaatcccagcactttggcaggtcgaggcaggcgaatcacaaggtcaggaattcgagaccagcctggctaacttggtgaaaccccgtctctactaaaaatacaaaaaattagccaggcgtagtggtgggtgcctgtaatctcagctactcgggaggctgaggcaggagaatagcttgaacctgggatgtggaggttgcagtgagcgagatcactccactgcactccagcctgggtgacagagcgagactctgtctcaaaaagaaaaagaaatgtacaggttcaaggactggaaacataacaaaagcgtaggcgcataagagaatgatctttcaggtagagccagccatgtgtttgcatcttatcttctcctctgtaagtcaggaagggtagcatgttccattcatgcgcaaagaaatagtccagaactcctcttctgccagacatccatccgtcctgtggccttggacctatggtttcactaccaactcttactctttcttttttctgagacagagtcttaccttgtcgcccaggctggagtgcagtggcgtgatctcggctcacggcaacctcctcctcccgggttcaagcgattctcctgcctcagcctcccgagtagctgggattacaggcacctgccaccacgcctggctgacttttgtattattagtagagatggggtttcactatgttggccgggctggtcttgaactcctgacctcaggtgacccacccgtctcagcctcccaaagtgctgggattataggcgtgagtcattacgcctggcccaactgttactctttcttttgcttagcgtggtgattctgaagcttgactaggcatcagaataaacttgagggcttcctgatgcaggacatctggggagaggcctgagaatttgcgtttctcacattgctgtcagcatcacctgggaactggggatcacagaactgagaatcgctggtagaacctcctagtacccaccttttttttccttctttaaaacttttgttaaattatacttcttaaaagctctctcttttttggcaaaattaaaatcctgtaggacaaaactatagtcccccgcccccctccatcttctgtcgtttagatcatgagctcctctgatacaaaggttgaaattttctccagtggtatggtggaaagaacttaggttttacagtcagatgaattctaggataaaatcttgactctgtcacttattagctctatgactttggacaaattatttaaccactaagaggctccattatctcatctatgaaatggaactagtgatttccaaatcttgggagttttgtgagggttgactggggtaatgtgtgtaacctcctagtatggtgacagaccgtaatgaaaacagcctaatgtttacagagcattgattgagcagtaggccttcttttaaggtctttacatttatgaacttccctaattgtgacaacagctcattttacagcctatgaagagggttcattactatctccattttacagatgaagaaagtacagcccagagaagggactggctcaagaccaaacagctggccgaactggaatttgaattctgtgatctggatctagagcccatatcccagccaccatgctttgctgtgttaacagtataagtttagcagtccgccttgctaggatgcagttactctatgatgccacgtaaagagaggtccatgacacagacagataaatgccacatgttctcactcatgtgtgggagctaaaaacaactgagctcatagaaacagaagtaggggtgaggcactgtggctcacgtctgtaatcccagcactttgggaagccaaggcgggtggatcacttgaggtcaggagttcgagaccagcctgggcaacatgtggagacccccatctctacaaaaatacaaaaattagcctggcattgtggtgcgcaccagggatcccagctactctggaggctaagatgggaggattgcttgagcccaggaggtcgaggctgcagtgaggtatgatcacaccactgcactctagcctgggtaacagagggagaccctgtctgaaagaaggaggctgggaagtgcagcagggaggggagggcaggagtaggttggttaatggatgtaaaattacaactagacaggaggaataagttctagtgttctaaagcaccgtagggcgaatatagttaacaatttattttatttgttcaaaaagctagaagagaggattttcagtgttcccaacacaaagaaatggttttcgaggtgatggatatgctgattaccctgattggatccattacacatagcatacatggatagaaatagcactctgtgctctataaatgtgtacaatttttacatgtcaactgaaaataaaaggaaaaaaagatgtgcaaatatgttttgagatctttaaagcgccatgtaaatgtgtggtatgttttgcttgttaggagtactgctgtcccattatgtatttgaacaactcctcataaagtacctttggcttggggaaaaaaaagagttaacagtgagtgtcatattgaccatactgtgagcaggatctggtcacggtgaggcatggtgatcatggaagacactcgaaggctctggttggtttgctagccaaaataggtcagagtgtgtgtgtgggggggggtgagagtgtgtgtgtgtgtgtgtgagagtgtgtggggtgtgtgtgggggggtgagtgtgtgtgagacagtgtgtgaggggtgtgtgagtgtgtagggtgagtgtgtgagagagtgtgtgagagtgtgtgagagtgtgtgggggtgtgtgagagtgtgtgtgggtgtttgtggggggtgtgagagtgtgtggggggtgagtgtgtgtgagtgtgtgaggggtgtgtgtagggtgagtgtgtgatagtgtgagagtgtgtgggggtgtgtgagagtgtgtggggtgagtgtgtgggaggtgagagtgtgtgagagagtgtagggtgagtgtgtgtgagagtgagtgtgagagtgtgtggggtgagtgtgtgtgagtgtgtgggggtgagagagtgtgtgtgagagtgtgtgtgtgagtgtgtgagaaagtgtgtgtgtgagagtgtgtgggggagggtgtgtgtgtgtgagagtgagtgtatgtgagagacagagggtggtgtgtgtttgtgcctgtgtgagtgtgtgtactgcagggtagatatcctgatacctgtttcatgccttcaggcccacagctggctgtggcctcgcaggaccaggaatgcgtttgtgtgtaattatgtcaccctctagcggtgacttccctactagccctttatccttgaaaagcccactcgggtgtcggtgacctctcttcccagtgacagcccgggagcagaacttcggggagattctggcatggagggacagtgctgggaaaagcggggtgtggccgggcatgaagagagtgccagggcccgggaagagtgaaaagtacaactaggactaatgaggagtgcaccctgccgagcagaaggggaagcaggagcgggccaggcacagcgtctggagaggagggaagagaaggcgctctcaaggggaggctcttgcgtgtcaatttctgccaagtgccattttatgtctgtggggtgggacggttatcgcagctagagctctttccagaatgtcagcactgagggccgaagtgggcgtggagaagcagtttcaattctgttttccaagggaagtaggcacaggtttagaggctgcctggagctgcctaaattccaaacgttcaccaccgtggagtggactgctgacttggctgcttctgcctagcctggggctctgttccctctgccagtaaaggtcattttatcaggatcctcagaggctttcgcatgttgataaatatttcaaaagacaagggggaatcaagatcagtcttactgagagcggatttggaactccgcgttcggcgggacgctgccgcccgaggcctgactgagccacagtgcgaagggtgctccctttttgaaaaggtgctggcgccaggccaggctttgctggaaagtcctatctggatgagtcagagcatttacatttcttacataatgtcagacccagaggagctttagggatcagcccagctacagagttcacagccaggtccccttttctgccaagaggatagggttaaaggttttaaaaaaaacaagcagagtctcaaggggcagaaaagcgaaggctcagagttaatgctgattaactcttcacaccccagaaaagatggttctgaggtaaaaccacacctttatgtcacatgatgccactgccttcctgaatccagtcattcctaaagaggtcagtaacaccaagcactgaccttcccgccttgtgtgcaggaaattaaagaggcatgaaaaccctgtccacattttctctaaagttggaacagcttgcctggggcttcagactgagcttcaatctcaagcttcagtgagattctttgttgtttattttttatttttaaactatttggccaggcgcggtggctcacgcctgtaatcccagcactttgggaggccgaggtaggcagatcacttgaggtcaggagtttgagatcagcctggccaacatggtgaaacctcatctctactaaaaatacaaaaattagccagtgtgatggtgtacgcctgtaatcccacctgctcaggaggctgaagcaggagaatcgcatgaacctgggagacggaggttgcagtcagctgagatcgagcaactgcactccagcctgggcgacagagcaagactccgtctcaaaataaacaaacaaactaactaactaactaactaacttactattgaaggccaaagagttcaagtaactaacataagaaatcagtggctactgttgtaaccatcaagaattctttaatgggccaggtgcagtggctcaggcctgtaatcccaacactttgggaggccaaggcaggtggattacgaggtcaggagttcgggatcagcctggccaacatggtgaaaccctgtctctactaaaaatacaaaaattagctgggtctggtggagcacacctgtaatcctagctactcaggaggctgaggcagaattgcttgaactggggaggcggaggttgcagtgaactgagatcacgcaactgcactccagcctgggtgacagagcaagactctgtctcagaaaaaaaaagaaagaaagaaaaaaaaaagaattccttaatttccttaatttaactggttcagggaacctaaatgagagttgtcacataatagcaaatcttagtgaccagatgacactcaaagcaggtgtaaatatttaacaaaagcactgtgtagacatttaatgacaatggttgctttttgtttgcttgctttttatttgtttacaaatgaaaataaagcagagaatgagaagtcactttctcagggtcacgggaacaattcaggttgaacgcatctctcctccgacatgccgagcgtctttgagtctcctcacccaggcgcacactcaggattgcagtcatctgctattgttgcctttatttattttgagacggagtctcgctcttgtcacccaggctggagtgcagtgatgcgatctcggctcactgcaacctccgcctcccgggttcaagggattctcctgcctcagcctcccgaatagctgggactacaggcatgtaccaccacgctcagctaatttttttttttttgtatttttagtagagacggggtttcaccatgttggccaggctggtcttgaactcctgagttcaggtgatccacccgtctcggcctcccaaagtgctgggattacaggtaggagccactgcacctggcctattgttgcctttttacttgatatttcaataaatttgtgagcaattggaatggtaagaaattcgctgcagtacataaaagtttgatcacttagactgctgtgtgattagggttgctcagtgatcttccggcaataaagggaggaaaaggagaaatttcagatggagtgatgatggatgtcctcaggcatgtcaatggctgctgaagtgctatgggaaaatggaaaacacaatctttgggatccctctttcagccattttcctgcttttatatctataaactttaaaaagtagggcatactttaaacaatagtatactaagaaattgtcaccgctggcagagccaaaattgaatcagcttgccttgtgattacatcagaaatgtgtcttagtctgtaaagcttcactacaggaaatgcccaggagctgctaataaagtttaatacacatttgcttccttaatgctatattaacatcctgaccatcacaactttcattgtaaacctattgcttattaaaaacaccctgtaagatgtcacaaactgacagaaagttggggctactacatgaattaatatgctaactagtatttttcagtgttatatagtataagatagtaagtgcttgaaatatgagcattttgaaatccttggccagcataatcccatgggtaacactgaattatccatggctgtgggagagagcaggtggttcacttccaaccatgggttgtgttccaaactaagggtttttgtttgttttgttttctttcttttaaagaaaatcaagtttatttttgaaactgttcattttaattctaagacaaagctagaaaaagaagaatggaagatctggaaaaaaagcattgtcaactgtcactgtcctaccatgggaaagaaatgtcttacaaacggaaaaaaaagttggagagaacgagaagtttctggtgttatgtaagaggaagcgcccagattacatataaaagtcaactgcttcacgccctgttactaaatattagggatgcaaaatacgtggtggcagtaagtcagagcctggtttcctaaatatttcttacatgttagggatcctgagagatccctaaacaagtagaaaattcttttttttttctttttgagacagggtctcactctgttgcctaggctgaagtgcaatggcataatcatggctcactgcagcctcaacctcctgggatcctgggctcctgggctcctggggtgatcctcccacctcagcctcccgagaagttccactacagccagccaccacgcctggctaattttgcatttttagtagagacggggtttctccatgttggtcaggctggtctcgaactcctgacctcaagtgagccacccgcctcgtcctcccaaagtgctgggattacaggtgtgagacactgcgcccggccaacaagtggaaaatactatcctgaatgagtgtgtgtgtgcctgctgggagaatatttcctagtgtttcctagatccttgttagttgacttcccacccacaaagccccagaaggagtaaactgtctctaaatatcagaataaacaacaacaataaaacaacttttatattttcatttctttttctttttgttttgttttgttttgttttgttttgttttttgagacagggtctcactctgttgctcaggctggagtgcagtggtgtaatcatggctcactgcagccttgaactgctggtctcaagcaattctcctgccccagcctaccaagcagctgggactacaggcatgcgccaccacacccagctaattttaaaattttttgtagagacagggtgtccctatattgcccaggctggtctctaactcctggtctcaagtgatccacctgcctcagcctcccaaaatgctgggatttccggcgtggacctcactgcccagctaaaacaacttttaaaaggtatattagagatccaactagattctactcttgcatttatctgcagcatatcagtttggtttgcccatggttaggtggttcttggtctgggtcttagtttcatgcgtctatgcatatgtggaaactcatcaagctgtacatttaagacttgtgcgttttaactctgtgtgttttgtttcaattttaaaaagtttttatttatttattttttaagtcagaaggggtttaatgggtcaagaaaagtttacttctgtgcacacaaattatctcaaggtctgtttgttcaaacagggtaaccaaacagggaccgattctacagtggctgctgcccggagttttacacagatgggagcatggccgtacccctgaaccctccaaccttctcttgcctgtgattaccactccttccctggccttttctggcctggctgctttcactgctgaagtagggcaaggattttgtttctcttcattacccttcaccttgccaggcctctgttcatcccatccctcggcccctagtacaaagtatgcagttagcactccataaatattgactttaattttgattatttttctctggttaatatgtgttgggggccgggtgcggtggctcatgcctgtaatctcaaaactttgggaggccaaggtgagaagatcacttgagcccagcagttcaaaaccagcttgggcaatacagtgagatctagtctctttttttttttcaaaataattaaaaataaatatgtgttggggtgggcagtgagtgcgggaaagaagggggaaagggagattgtttctaatgtacagacggggagacgtctggggctgcgtaggagctggggtgaagagcacaaggcattctggttttgcctctgtatttgataatgttttcttaatgttggaaaaatgcaatagttttatcatttgccacataccttcccatgctgttccctactgaaccaaatcaggtcatattatactggctatgttatactgcgctgttttccattgactttttggttattgatattggcttttagtgttgggtgtgtggtttcttttcacacaaacatgaatacgttgtaccactgagattttcctaggggttcagtcattttgagttggagatggtcattgggatgcatttttacattcctgttctcactttctttttttttttttttttttgagacggagtctcgctctgtcacccaggctggagtgtagcggcctgatctcggctcactgcaagctccgcctcccgggttcatgccattctcctgcctcagcctcccgagtagctgggactacaggcgcccgccaccatgcccagctaattttttgtatttttagtagagatggggtttcattgtgttagccaggatgaccttgatctcctgaccttgtgatccgcctgcctcagcctcccaaagtgctgggattacaggcatgagccaccatgcccggctcctgttctcactttcatctgtgggtgccacccagagcataggctttctatggaacagtgaatgtgcttacatatgagtagaagaagcgaggtttttcttatgcagcccgggagacaaggaaaccgctgtgatgccgtgtgccaatagcatgcatttatttgtggtatatcagagcctcagatccagccatcccagacagtcacgtccacaaggatgagacccttttgcaggagacagagaacacacctcccttattcctgctccagcagttgagatctgctggagacccttactcatgtttcctggacttgaactttaggacactggccactgggcattttttgcagagggtactcattagaatttctctttctgtcagttttttagcctattttttaagctaaatttctaaatgcttttgaaaccaacggtgttgttttattttgctgatagaacccagatgcgaggagggagttgtttttttttttttccttccatcatttgaatcattgcacaagcaccgtatcacctagaaacagagggtgatttcaggacagtgctgtggccacaaagcatggttaggtttggaaaagcagcagggaaaaaaaaatgccttctgattcaacacttccgttctatgtgatttaagcacatatctagttacaaggtttctttggcaaaaacaattttttgctctggagttagccaggcaaagccagcgtccccctggccagttgagtttgaggaccatctgcctcacacatcattagcagcattgtttgtttagggcccttctgtagaatctttattcatggagaagtagaagaaaactcaaacagctcagctggatttccaggtcctgcgtggaatttgtaacccctttgacttctcaactgagaaaattggatgcggctgtcacagaaagagaataaatacggaaccccacaatgctatgcttgcagccacttttattccattgaatttcacacataatgaaaggcaggcatactctgagaggcacggagctgaaccagtgctgggagtcctgcaattccaagtaggttgagctggtgataattctgggcaaaatactttagtcctctttagttggccgctggctaaagcatgcgggcagtgatacggctcctgttatcctactgcgagtgttctgcttttagaactaagaaaacggtgaaagaggaaagacaagtgattagttaacacctaaaagatgtatgccctcacgaataatcaaagaaaggcagtttaaaatttgatagcattttttccctattgtgagaaagaattttttaaaatgataatatccaaacatcttaattagcttttgtcatttaaagctaaaacccagtttagtgttttattagacttgactttcatgaaaggttgggaattctaaaaataacttattttgaaagagtaatgaatggcccaacaaacttaatggtccagttcaagctattggttgactggtcaatagatgctagagaagttaggactggaaaagacgttagggcttatgtggctctgccctgtcattttctaactgagaaggctgggacctagagacgttgtgtgacttgtctagggtcacacagttgtacggaggctggaattgcattagtaaaacatgatgagttgttatttagatcttgctctcagcaaatagcttcatataggattaaactttttgttttcaatacctcaaggatgttgagcttccctgtctttccagacagacaggatgtccgagacctcaaatcaggcactgttgcctcatttattctttgtccttagatgaacgagtggctggatacctctacatctttagaaaaaaattttttgagatacagtcttactctgccacccaggctggagtgcagctgcatgatcgtggctcactgcaacctccaactcctgggccaagcgatcctcccacctcagcctcctgagtagctgggactgcaggtgtgcatcaccatgcccagctaatgtttttatttttgtagagataggggtctcactgtgttccccaggctggtctggaactcctgggctcaagtgatcctcccacctcagcctcccaaactgctgggattgcaggcgtgagccaccacatccggcctagatctgtttaatggggataataatcctggcacaattgatgtccctttgataatcttgaaaccccttgagcaactacaaataaaaataaggcatgtacagtctaaaagggggataaacgtatataggtaagtctaatacaaaacagaataagtgttgtaagaggttgtattagttaaggtcttgaggttcctgtaacaaacaaatctcccaaatgtaaattggctctagaatcatagaaatttatttctagcccatgtaaaagccaaaatagatgttcattattatcaggcaggtctccctctggtaattttggggcttgggcttcttctgatttatcactctacctttggcctggttttgaaggccaccatgcttgtctgcatcaagctgaaagaagaaaagcgagcttggaggtctcctggttggagatttttagaggccaggcctgggagctgcagacatcacttcttctagtatacctttagatagcacccagtcatatgaccacctctttgtgcagtggatgctgggtaatgtagtccagcggtgtgcaattttagtgaccatcaagtgatctctgctacaatgggctttgagggcccaaaggaggaggacgtcatatgagagtgaagtaacttattggacaaatacacacatgcctaggagggtggaaataattaataattatttctactattaaccgtgattttgtcttaattttaataagagggttatatatctcttacatattacagataatcttcaggaatcttaggaattcctaaatttatcctaatatttaggaattcctaaattcctgaaaataaggtgggatatgtatctcaatttgtttgtattttcaggagtggtgactctttctgatccatggcctgtgcttacaagatagccggatcccatggagatcacacctgctccagctgtctcatgcagcttgggaggtgaccacagaaacagtgggccctccccaaagccacatgcggatagactatagtcaggactcttcatctccattcagcagtgaccagaggccagcggcccgaggcctgtgctggtggtttgttccagctgcggacatttgtcatcccttggctgcataaggcacagaccacacctcctcgtctcctttccactcaggctgacagtgctctccttctgccccttgtagtgtttctactgaatcagacctcccagctgggctcccaccttccagatgcttaccctccacactccatccatcattattggagcaaacgattaccagagcttttctaaatccacatctgatggtgcctctcccctgttcagatgcctcggatgtctcctgcagatgacaagagacgcccaaactccttataagggggccccaataggaaggttctgcttcacgaagaattaatgacttttgtttgtctttagattttggctttggttctctctctctctctctctgtctctctttctctcccccttccctcttctgttttctgaagttgaattttggacttgaaactacgtgtcatgtgtttttcaggcctctgtgcctttgctccttgggcgggtctcattctcctatctccagctgtgagaatcctgtgtgtcctcttagggacaggttcaaataccatcacccccagaaagcatccccaccgttggaacgacatagtctttctcagctgtttggatagtaattgatacctccattataacgtattgccctgctaaatgttataatcacatatgtttgcctcacctctacgagattcctgttattcaaccaagagttcctgttactcaactttgagtaagacctaatagatgctcaataatattagttgacttgaattaagagtcacagaaagaattccatttcgattactttttggcattttcactgggtctgaactttttcgtttactctgagtagcaaatttaaaatagcaaacaatttggttctgatcatgggaaattgctctcaaggtcattgcagaatggctgcttttcctaaagattacctgcaatgatggaagtataggttgtcattggaatagaaaatggttgtctccatggctggtaggtggggtcttgctcctgggcggtaggttagagtttgctacccttaccttgagtgccatggtactttgcaagtaactctgttaaagctcctactgcaccacgtttaaacaatggatttcaaatggaactttcggttttgtacaagtgatgatttgtgttcttgcctggcttccactctagaccagcactatgagacagtccataagctctctgtgatcatggaaacgttctataatccgtgctgtccaaaacaatagccactagccacttgtagctactgagcccttgaaacgtggcttctgcaatggaggaactgaacatttaatttaaattcatttttaatttaaatagccacatgtggtcagtggctaccatcttgggcagtgatattgagttcctaggagagtagcattgtattaattgattggaatatcctatacagtactgtgtattgagtaaacctacagtaagcatgtgttaaatgatgaacagttaacatttattgagtgcctgctgaatgctaggtgcttcccagaggctgtccttgtgttaccttcattttctgcagagccccgtgctggggcagcatagacagcaagcttgacccccatcattgcagccttcaccaagaaaacaggcagtcgagggagcaatttagcaagagggtcaggagttccgtgaaaagaagcctggcagagccataaaagaaactaaagaattttggtggtgaaccaaaagcctctgtaacctgcccaggcctgaatttggtgatcatgcttttgcctgaggcagccacagaggttatttaattctcaaaactagggcctgtgagacccacaaacctggtctgaggtttgctagcagggactctagttttggcaaagggaatgtgaactgcttagcattggagggggagacaggagagctgaccaccttggctctgaatgttctcatcggtgaggaaggaactggtgctgtgcctgagtgggcgtgaacttgttttgcctgtggttttctttagaaagctgcttggttcctcttctctcaaaggatttggaaggtcttccccgcacaatcaaaggagcagtttgagacacaggggcgacagctggggacagcattagagggacccacattacttagagctactggtttccccccagataaaaacccaggtgtcgtttctgcatgagcagtgagtgacgaggagaattcgcttgcagcctctccgctacgctctgcctttagagtccctctagccgtggtccctgtgttgccgcttgcccctgggtacctgactgatgaagacaggctctggggctcgccgttgaaggtgctgtggacccaggggtgctgtccttccgctgttccattcattgcaacattcatctcctgcctgtttacaaaaatgaagcaattatcctattcttccaaatggaaactgctaatttttgaagcagaaggttgacagcttcagtaagatctcaagagagcgagaagactggaatcaggtgaggccataacttcttatctaaacttagtttctggggtggaattacagaattgcttagaaaaagagtcaatataactacttgcagaaaataccacctgtaaaaatccagatttataaatggtgactatgcatttagtacaatgattatcatatatgtaatatataaaatatatatataatatgtatattgaggtccctttaaagaacagcatgatgggctggctcatgcctataatcctagcagtttgggaggctgaggcaggtggattgcttgagcccaggagttcaagactagtctgggcaacatggtgaaactctacaaaaaaatacaaaaattagctgggcattgtggcatgtgcctgtagtctcagctactcaggatgctgaggtaggaggatcacctgaccacagagagatcagagctgcagtgagccatgatcacaccactgcagtccagcctgagcaacacagtgagaccctatctcaaaaaaaagaaaagaaaaagaaaaaagaactgcatggcaaatttgaaagtcttttggaacatgacttgtgaatgctccaaacattccaaaatgaatgagtgaagtagccaggagaaagacagcagagagcagtggggatttgggaaagttagagaacctgtgtgccacccaccaagacattcatattccaaagatttgtaaacattgtgttagtcaaagacacttgggctgggcgcagtggctcatgcttgtaatcgcagcactttgggaagcctaggagggaggattgcttgaggccgggagttcaagaccagcctggacaatatagggagacccccatctccacaaaagaatttaaaaacttaaccagacacagtggcttacacctgtagtcccagctactcaggaggctgaggtgggaggatcgcttgagcccaggagttcgaggctgcagtgagctgtgatcatgccaccgtactccagcctgggtgacagtgagacgatgtctccaaaaaagaaaagacagctagctgactgccagttggtgatcctggttttaaaagttgcatggtttccccaggtcctttaaaaatacgctccattttgcaaacacagtagtacctctacttggtagcacaagacacatttttattctaattagcgcatggcatagagagaggttatccacctgcccttggtggtgatccagaagtccatttatttacttcattcactctaagtagacaggaatttgcagaaaacagtagcaattgcacaaataaatgtttttcccctatagtacaataccccagaactctagatctggtgaaaatagattacttgcaggacaagagcatctaaacacccctcaatcctccagcccttgaaaacaaagtccatagccttgttctcttgaaacaattcctaaaccacactgacctgtgacctatacacttctgccttcttttctagagcatattttaaaactattttattagtattcaggagaagggaacttcctctttcttatcatctgcacagaataagacttccagtggacttttgcttgatacctggggagaaaattgtgcttttccaagtaagatgagtcatctgagatctgccatttctgggaattgtacagggacccagagtcttagggatctgctctgcctactttgtggaatttattctcacagtgcatgagttggtcactttcacactgctccaggcaccaggagttggaagctggaagctctattctctggaacatcaggcattagattttagtgtgaaggcctcaggaattgtttctgcgctcctgccaccctgcactgtgattgggtctgttttgctatatacttcccaaattgtgtaccttatcactgggaatggcacacacatttctggggaagggtagtttagcatttttcttaagggccagaatttaaatctcatcactcctaccaagcccccagcccctcccaccaagcccccagcccctccccacccctaagacatttcttctcctgcaagccagagaaacaatgagaaaagacacagaatatttgggagatgaggcttcccaaaggactgctgcaatcatggtggagctgatacaaccctctccccgcccaattttttattttcatttctaccaactgtagattatgcatacacacaagcagatcacacaaaagaatactatgcctcagggctaggaggattcattgagcaaagcttggaaggaagaactagagagaaacctagagacagagaccctcgggagaaataattaaggctggcagggaaaggctgtgttaattgagctgagaagaaagatgagcatccggggattctcgtaagaggtggtggaatttgcagataaagtcattggtacattattggattcatctttggttactactttttaaaaatgttttttggggaagaatgctatctagaaaaaaattcatgcaagagaaacagatagctacagaactaaatagtaataactgaccaaaaaaaaaagtgagacagagggtgattttgccatatcctcatttcctggactgagcaagagaggaagcgaaatgctgagtcggctcctggcgtagcggctgccattcatgtgccgttgatccaggcctggcactgcgagagcaatacccattggtttgcacagaactccctcccaccagccccacctgccctcaaatagtcatcccacgtggttgtctctacctaaatttcccaacatgtttctttttgagtatgaggatcttcttttttaagtcaaaaaataaaaataaaaaaggtcacatgccccatgagaccataattgtactttccgccaagaaaatataatatataaagaccttcaagccattaggtattaatatgacttttttatttttaaatatttttgttgtctaatataatgcagaaaattgcatacagcataatacatgcacaacttaataaactgctgtagtgtgaactgccacatatccatcaccaggttggaaaatagaacattgctggtatcccaggaacttcctcgagccccttcctcatcacagccccctcccttggaaaccactccctgatgtcatcatttccttgcttgcttttctttatggcttaaccaccaatgtgtgggtccccaaacaagatagttttgctatgaatggaaccatagttcatatactttcttgtgacttgcttcttctcaatattatgttcagaagatccatgcatgtggttgcatgtaacttgtagtttgttttccttcctgcataataattctttgttgtaatatatcacagttaattgttttgtccattctattgttgatggatattgttgcttctggtctgaggctatcaagagtgctgctattcttttgttgttgttttttttttttgacatggagtctcagtttgtcacacaggctggagtgcaatggcgcgaccttggcttactgcaacctccgcctcttgggttcaagtgattctcctgcctcaggctcccaagtagctgggactacaggcacccgccaccacacccagcaaattttttttttttttttttagacggagtctcgctctgtggccaggctggggtgcaatggcacgaccttggctcactgcaacctccacctcccgggttcaagcgattctcctgcctcagcctcccaagtagctgggactacaggcatgcgccaccacccctggctaatttttctattattggtagagacaggtttcaccatgttggccaggatagtcttgatctcttgacctcgtaatctgcccgcctcagcctcccaaagtgctggcattacaggtgtgagccaccgcgccccaccctgttattttgaaagttagagaactgccatggggaaattcatttatcctttcaagagataagaatgggacataagatattgcaatttgttagagaaaaagaggtcaattagcaggctcttgtagtagctcatagtatgacaataggaatgttgagtagggaatatattcaaaaaacactatagagatacaatcaagagaccttggcaattgatttgacgtggaaggcaaagaagagggaggagtcacaaaggataccaagatttcaggcctggatacaggaagagaattggaagacagagaacacgcatgattgatatgaaggtgtgtaatcaatcagcattttaacttctatatttggctctctaggaagattcactcaacccacattttatgatcaaaaggacagtatccagggtgactggtcccctatgtctttgaccccattcctgcagtgttgcccccagaaactggaagcatgtcatgatgggagttttcctgggtaattgatgctgaattatcaatgggaataccaaatcagattttttaaaaagttaatttaacatttattatttttagagacctctgtcatccaggctggagtgcagtggtacaatcatagctcactgcagccttgacctcctgtgatcctcccgcttcagcctcctaagtagctaggattacagacatgtgccaccatatccagctatttttttttttttttttggtagagatgaggcctcactatgtcggccaggctggtctcaaactcctggcctcgagtgatcctcccatcccggcctcccaaagtgctgggattacagatgtgagccaccatgcctggccccatattagattttggagggactacataaatttcacgaacaagcaattctgaaaacagtggaaattattgaagtcctccttcattgcactatctctcctcttcttcgaaaagcaccttgaaattttctctttgaccaaaccacatcttcatgtgaaatcctttctgctgttttcctcctgttaaaagccctcatattcttcaaggccctactcaaatcccacatcctgagtacagctgctcccttaggctcttctgacacttctttttttttttttttttttttgagacggagtctcgctctgtcgcccaggctggagtgcagtggcgtgatctcggctcactgcaagctccgcttcccgggttcacgccattctcctgcttcagcctcctgagtcgctgggactacaggcgcccgccaccacgcccggctaattttttgtatttttagtagatgacacttcttatagtgtacttttctgggcaggttttctgttttccccagctagaccaatgcaccttggggcactccccaaggtcttacacatttttacattatcttattaagcagtgccagcctttactcttagaagctgaatgttacttatgtctttgaggaaaagacagagagttatgtctgggaccaggaatctccaaaatctcaattagcagtggattctcagataaggggaggtacagtcaagcagcttcctcacagcaaatggaccaagttgtatggaagtcgaagggactctccttgtcttcatgagaggctggccttcgtggcctgcttcctctttccctgagagccagaggagggcttttcttttctttcagtcaacaaatatttttctagcaactcccacatacccctgtgtactatcctatccactggggagaaaatggtaaataagaccgtttccagagcatatgagggacagaaacaaaagcacaacagatgagcatgccacactattccatgtcacattaaatgctgtggctaaaacatgtgagaagctagaaatagaatgatgctgctgggggccttctttggcagagatggttagagaaggcctcttggaaggtgtggcctcaatgacaaaggagcttgctctgcacagagagaggagaaaccattcccagaagtcggcaaggcacagcggggagaaacaggatgggtttgggtaaggaggtatcaggagtttggggttctaaagcacagcatgaaatcctaaagaggatggaaaggttggcggggccagattctggaaggcgtcatgtaatggggtgaggagttatgactcatcctttaggagataggaaacctttgaagggttttttgttgttttttttttttttttttttttttttgagacggagtctcgctctttagcccaggccggactgcagtggcacagtctcggctcactacaagctccgtctcccaggttcacaccattctcctgcctcagcctcccgagtagctgggactacaggcgcccaccaccacacccagctaattttttgtatttttagtagagatgaggtttcaccgtgttagccaggatggtctccatctcctgacctcgtgatccgcccgcctcggcctcccaaagtgctgggattacaggcttgagccaccgcgcccggcctctttgaagggttttaagcaaagaagtcacatggtcaaatctaagctttgaacagagctcctcgatcgctatatctactgaaaggcaagacagttttgtgctatcgaagtaagagcctttcttgctgaggacatagtttcttggtgagtttcactgttaaggccaatctaaaatgtccctccacgttctctccaaaccttatgtttcttcacgtgcactctgtacctcacctctgcatcttccatgagcccctcacaccaaaccaggatccacccttccagacccatagctcttgacctggtttgtcttttccatcccaaagtaaaactaagtaccaactctttaaaactattatgttttaattcctccagctttaagcagcctggcctgttctcaacccacatatcattttggctaggggagaagtctagttctttccgcccacaaggctgtgtgtgtatctaagtgtgtgtattaatactagtaactttgcatgttttgtaaaccttgctttttgtgatatctcctgcatatcagaatgttgttttctgactttcacactattcgcagccgtagtaacagggcaatggtgcaacgaagaaaagaaagaggctgggtaccgcggctcacgcctgtaatcccagcactttgggaggccgaggcaggtggatcacctgaggtcaggagttcaagaccagcctggccaacatgatgaaacccatctctactaaaaatgcaaaaattagccggtcgtggtggcaggcacctgtaatcccagctactcgggaggctgaggcacaagcatcacttgaatcgggaggcggaggttgcagtgagctgagatcatgccacttgcctaggcaacaaagtgagactctgtctcaaaaaaaaaaaaaaaaaaaaaaaagagaaagcagagaaggtgttatgctctagtgacagggaggacctgtatttggggaagagtagaaagatctggattccaagccagggtcaaccattcaattgctgtatgaacaagtacttaattttagtttccctgttttcaaagtgagaataataatggcatatgccacaaatgttggcagagattaaatgagaaaaatagatgtgaaacatttagtgcagtgcactaagaggtgctcaataaatgttgattaatactagctattgtcactggttatcaatcaaaagacatttgttactgctgagtaaaaccatactgggcgcaaaggggctcgcagagaaagtagaaaaggtaagtttgaacctttaggaagcatttgatctactagagaagtaagaagtatatacttcacctgagaaacagcccaaggcagcataagtggggtagggaggtgcagaccagatacatggattcataagggccgaagaggttgagacctcttcggtctcaacccatgagaatgagattctcatggggtggggttaatcaagcacagttttatggagggagtgaatcttgagcctggatgtgaaagtagtttaatatctggattgctgcagagcagaggagaatgcttccttgggaagaggatcagaatgaggtcttgggggaaaagtggggtttgttctaggagtagaaggacattggaaaaggagacttcatgttgggaaattcaggaaaacaatgagaggtaagatgaggccacattggaaataaagaactgggaaccactatacgttttcaaataggggaatattatgatgtaaaattagtattttagggaaaactggtattgtgtctatgtgcacttgtgagtgagaccacgaagaactactctggtgttcagatgccagaagggtgagtactcacctggaaattgggaaggaaatgagtgaacctgatgtacattttaggaggtatttgtctattgtgctgaggtccataaacagtctttctctacagtacgagaaatgagtggccaaagggagagaagccacaggactccagctagcaaggcctgctcctcctccacctgcccctcccctgtcccatggaaatcatccagtctgaggcccctccttcaacagcaatgcagccaggagttcacaaagggaagcatttcctttccaaagactgctaagatggtttaccctgttatgccaggaatgttaacaaaattgcaaatgtacttttattcttttgttttttctcttttttttgagacggagtctcactttgtcacacaggctggagtgcagtggtgcaatctcggctcactgcaagctccacttcccaggttcaagcgattctcctgcctcagcctcccaagtatctggaattacaggcacccatcaccacgcccagctaatttttgtatttttagtagagataggtgttgccatgttggccaggctggtctcaaactcctgacctcaagtgatccacctgcctcagcctcccgaagcgctaggattacaggcatgagccaccgcaccctgcctgttttttttctctctctttttttttttttttttgaggcagggtctcaatctgtcacccacgctgaagtgcaatagcacaatcacgactcactacagccttgaactcctgggctcaagcgatcctctggcctcagcctcccaggcaccaccatgctcggctaactttagatttttttgtagagacagggtctcactgtgttgcctaggctggtcttgaactcctgggctcaagcaagcctcccacctcagcctctcaaagtgctgggattataggtgtgagctactgcacctggccacaagtgtatttttttttttttgagacagagtttcactcttgttgcccaggctggagtgcaatggcgcagtctcagctcactgcaacctccacctcccgagttcaagcaattctcctgcctcagcctcccgagtagctgggattacaggtatgtgccaccgtgcctggctaattttgtatttttagtagagacagggtttctccatgttgatcaggctggtctcgaactcctgacctcgggtaatccacctgcctcggcctcgcaaagtgctgggattacaggcgtgagccactactccaggccaagtgtatttttttttttttcagacggagtctcactctatcgcccaggctggagtgcagtggcacgatcttgacccactgcacgctccgcctcccaggttcacgccattctcctgcctcagcctcctgagtagctgggactacaggcgcccgccaccacactgggctaatttttttgtattttcagtagagacggggtttcaccgtgttagccaggatggtctcgatctcctgacctcatgatctgcccgcctcggcctcccaaagtgctggggttacagttgtgagccactgcgcccggccgccaaatgtatttttaaattacacattctatagctccccactgggtgaccaagtaagagtgcttttcttttctttcagtcaacaaatatttttctagcaactcccacatacccctgtgtactatcctatccactggggagaaaaatggtaaataagaccgtttccagagcatatgagggaaagaaacaaaaccacaacagatgagcacgccacactattccatggcacattaaatgctgcggctaaaacatgcaagaagctagaagtagaataatggcgatgggggccttctctgggagggatggtcagggaaggcatcttggaaggtgtggcctcagtgacaaaggaggcctgctcagcacccttgaagaggtccccacctaggctcgtggctatttctggacaggtttctggatgtgacggtgcctgtctgaggagaggggcagatgtgggaggtggctccatttcctgcaggagtcttgagatgcttgagtccctgggtgctggggaagtcagttctagatatcagtgggtttgtgtgaatggctaatgacctgaaatcaacccctcatcctgtggggcagagatgttgtttcaggcactgctctgaagtatggtggaaagcacagagttgcttggggtctcagctttacctgtcccggtctctctttttggtctcttaactctaggctggatggacatggccccttaaggaaatgaaagtgagtgactgagtcctagcagaaaaaggaggagatcttggagttcctgtcttccaacacgcacctctttggttgtgatggtgaagtgggacagtgccatctcagcagggaccttggatgtgctctagagggggtcttggaggtgtagcatcgttacatcccctcccaccatcctgcctacacagtggttttgggggcacagatatttcagagagtagtcttcccaagaaccctacatcaagtatgctaccaccccttcccattcttgattctggtcccctctttattttcctcatagtattcactggacctaacttatgatacatttgtttgttcactgccatgtctctggcacttagagcagtaactggcacatattaggcacccagggtgtaattcatttgattaatgaatgtattgaatggctgcatggatgaatgaagaggaggaacagagcagatgtctgaccagctcattctggcttctggaaggatcctgattgggaattttgcatctttccctccccacagcctcctagtcactactactaaagaatagagaccctgactcccacttttttttttttttgagatggagtcttgctctgtcacccggctggagtgcagttgtgctatcttggctcactgcaacctccacctcccaggttcaagcgattctcctgcctcagcctcccaagtagctgcgactgcaggcatgtgccaccacatctggctaatttttatacttttttattacaggtgagctttcaccatgttggccgggctggtctcgaactcctgacctcaggtgatctgcccaccttggccccccgaagagccccgcattcttaactactgtgtttggtatgtttgaattgacacttgcctcttaggaaggggaatctttttagaccctggggaaatctgtagttattgcaaaggccttttcctgcctgttgggcatttaccagatctttcttcctacacaaggagagcctcccctggttgaatcctgctataaatctcactagtgacccacaaacaggggtcccaatgtgacctgctcattaacacaaaaccgtcagcccccatacagcttcctgccttcccagtcgggttgaggcaagaaatttccattctgcccatgctgatgaaaccagtcgccagcatttacctttctaaggggtcctttctcctcccaccccagcccaccccagcacaagaatgtaagagagggcaaacagctgcctggcttcagttctatggccactcaagaattggctcgcatctgtctgccaggacagagagcgtcctgagggggctggtgtgtgtgttgtgtgtgtgtgtgtgcacgcgcgcgtgcatatgtgtgtatgggggagttcagtttcaggtaccacacatctggaagtcagagaaagaagccactgcacatgttagagccattttggggggcaatttttaaaaaaaaaaacatttttaatgggctgagagccgcctcgtggaaagcccggggcgggggatggagtagaaacagctgcgggagtgattcttgtctccatatatgtttataaggcactgagggcgggattagcagctcctgggaagtctggctctagttaccgtgtcagcctgtcctgggggcagtcacagccacagtgaccattagcaggcacccaggcctgtctttggctcggaaacggtggcccccaatgtagcctagtttgaacctaggaactgcaggaccagagagattccactggagcctgatggacgggtgacagaggtgagaggcactggtgtgagggacaagtgtcacaggcggggaggaagaactccgctatctggtggtggaaatgtgtgaggatcaaagtccccagggagagtaggtgttgcgggcggcagggtggtgggctgggcacgggctgggcataggctgggcaggaggcttcggggccgcggggaggaggctggagaagcaggagggcacgggcggccctagctctgcaaccccgggaaggactggtaggtggagttaaggatatttggacaaggaaacgctttgaagcttttctctcgtcctccctactcgggacctggtcgcctcccctccataaaaccattagctcctggtgccagccctatctctgctccatctctcgtggttccagccggtgcattcacagaccttctgccccgggggacgaggaggatttatggggggagaggagagggggaggggcatcctccagaggagggggggtctgaggggagtcgggcgtggaagctgttagtcccgggctgggggccggctcacttccgagctggctctgcatgacaaaggggaaggagcaagtgtcttctttgatctgccccctgccggccccacacacctgcctgttggtgcccccgccccagccgaggcttcgagaaggaaaatcaaaagggggcttggggaagggctgtgtcccagctctcctggaccctgctcgggccactgtcctctcctggcggccccaggacaaaaatacttcccgggctgatgacccgaagcacccgccgccccctcccggggagcctggggacgccgacgcgcgagagtggcgcagtgagccggggcgcgcggggctgcgctcgtcaggtccggggccccggggaggccgctgggggcgcgggtcacgcccagacgggggccccggaggaccgcgggggagccgcaggggccgtgtgtcccgaggcgcaggctcgctctagcagcactgacctgctgcgggtcccagggcctggggacaggggctctcgggggcggatagaggaacaggcgtgggttacagcaggcaggaggccaagaggcgggaggcccgggagccagcagggaagggctgtggcatctggaagatgcgtcctcagctcaggcatttgatgccagagctgccgcctggcgtcggcagtgtccccggtgcagctgctgggcaaggtactcggtgccgccctcgaggaccacggtgccgggaggggcaggggccgcctagggaggcaccacctcagccgccagagctttccgggcgggcggttcgcggcgtggcttgtacatttctcagagaagctgccttgagaaagtgaaaagtccttgatctgtacgcaggggttgggacttaggaaacccgctgagggtgagaagggcgcagatggagaggggagactcctccctgggtgcaggtaaatccaattcaccaaaatgttttaatcctacaaaggagagcctgagggtcagagaaataagtctctgggctggaatgagaggtaggcacgtgggggagtggataggatgggccccatttctttggatgttctgcagcaaggacaggtatgctttacaacagccgaagtggcctcccggctgccgaacggaggaacgccgcaagctccgctcttgaaattacttgttttcatttctctttgtggtttctcagctcattatttctttggaaattaggtcctgtgcagggttcccacagtttggggtaagagacagaagtcctagggtgggaagatgagcagtgggaggcggaggctggaaagaggccgagcttctttgtggggaacacgcagcacgtaagcatcagtgcaactttctccgcctcaccccggctcctggtctgcccttatccgctgagtttccacactgactctccatttctgttttctccagggaaccctactctggaaactgtcagtcccagggcactggggagggctgaggccgaccatgcccagcctgctgctgctgttcacggctgctctgctgtccagctgggctcagcttctgacagacgccaactcctggtggtgagtaagaggggctgaggtcctgcctgcacagccggaggcctccttcagcgactgagatgaggaggaagggcaccgtgtgtcacggtagtaccttgattcctgggagtactaagggcctcttttatcccaggaaaactaagaacgctctgtgtctctctcaacccttatctttgtaagggttccctgaggataaaggttccgttcatttgatttttttctctaatcctgtccacattccttttccttggaccttccctcatgcccatgaattgttagaaattgctcttgggtcaacaagaatatcaatacttggtagttttttgttcctttgttttgtgtgttttgctggtaggatatagaattcctcttttataagtctgaaggccagatgaggggttcacagcaccatgggtggctggctttcttcttatgttttaagggctgttgtcattgccaagttgacagggaaatggcaggcgatcaccacctattttgcatggtctctgccactagcatttttactcagatagcaaatctgcagccttctcatctaacactctatatggctggtagatgatgagcaaaagggagagcctctgaactggtggagagtggatgaggggaagctcaaagtgagacatggcagtgaaaacaagtagactagatcgtgatgtatgtaaagtgattggattttaaaggcccaaagggagtaccacgcaaaggattgattgctttccatggcttatcatgtacttgggctgcactgaactagtcactcctactcattgaatgaggcctgtgctctcctgttgaggtttggctctttttgccctctattaaaatgaagagctgctccccacccctcgtcttcttatctgcctgacccccattcttaagatccagttcaaattctggccatttccttataaaggcttctcttcagccataagggctattttcctatctgatcacagcagatccagaagcatatccagagtctgtctggggcatttggcatctcgcatgtcctttgtgttcatgcctcagattccttcagtttgtcctttgaaggccagcactctgatttactaatttttctttccagggccttgtacacagggacgcattcaataaatgtgttgaatgaatgacttaatgctgcacacaggcgtatgctcactcctgggcctttttttcccctttctggattgctgtcctaggtcattagctttgaacccggtgcagagacccgagatgtttatcatcggtgcccagcccgtgtgcagtcagcttcccgggctctcccctggccagaggaagctgtgccaattgtaccaggagcacatggcctacataggggagggagccaagactggcatcaaggaatgccagcaccagttccggcagcggcggtggaattgcagcacagcggacaacgcatctgtctttgggagagtcatgcagataggtaagaggccattacaagagggctcggccaaggaactgcactcgtctcgtttgggagcaattaagctctctcaggactggcacagggagagcccaaaggcagcctaagtgggctctctctaggcttggcagcagtgtgcaccacgagagaggcacacgaggaagcaggctctgggaggctgcagaaaccacacgcttgatgttcctctagctctctgccttccagcctcacttggggcaggttgcttgggactcactgagagggggcaggttgcttgggactcactgagagggggcaggacatctgagttgacttagagtggattaggagagccgcccaccgccactgcctttgtgtctcagtgcaaaaaagagccttgggtagagaaccagaaattgcagccctgaatgtctgttggatttttgcctcttccacttcaacctttgacagagagatagaaatgtcggccaaagtgttgatagctgtcactaacccaaccccatccagtcccagctttttcttttgaaagagatgtgtgaacatgggggaaggggtcagacgaaagaaaagatgagagggagagggccaagtcttctggattcctgtcccttcccctctcccactgctggccaaggattcttgggccaccctattgcttagatggaggtgtgatctgaggtctaattgttttaggtccttttgaaatgcaatcctctcctctctggcaagaaattgagaaatccggccctattctactgggtcttatccccagggccataaaagggaagtgttagaatgctgtgttccttctgcctgacattctcccagaacacctcccttcaaaaggttacctgaggctggagtttccccagagagggatttcagcctgggaggggagttggggaggtagagatttcttcgtgctcctctcttagggaggatacttggaaggctccttccccctcccacttattccagacctctttccctaccctctctgtcccatattgagaagtaatgcccaatgcagtagctcacgcctgtaatcccagcaccttgggaggctgaggcaggaggattccttgaggccaggagttcaagaccagcctgggtaacatagtgagacctctgtctctataaaaaaaattttttttttctaaagagagagagggaattaaagatgggaaaagtacacattgaaacttgctgctctcttgcttccttcggtatcaactcagggtgcataaaaggaaggtcctagtgttcctggggcagctttcccaaaagagtagacttggggttttagtgggatttactcatagtttattgattcttctcaaacccacctggcacttgtctcttctttctggcgaaaatcttggcagcacttcctgccctgcgttttgggcaatgaaactaggacggcccaggtgcagagtctcctctaatctcttcagtggagttaatgtttattgaagacctaaagtaggcctgatgttggctagatccttttcatgtgtatttcgtgtgcataaaggccccaaagtgaggctgtactttaggaaagaaaggggttggcaggaaaagacactccgctgggttcagatgtgcactaggtggccagcgaaagcaaaccctgtcgaagagagcccatctctctgtgccctattccgttacaaaatggaacccttctgtttgcctaattttcccccttcctttttatagcatcactgaaggctcatgctacctaggaggctgtcctcccttcctcccccctgagcccagagtagctcctggtgagtcctccctctccctatcttgagaaggaccgtctaaggcttcctttctcctttgaagctgctgcaaaagtcggtcaccagagggcggcagagcagctcggaggagcctcggcccgttgcccagcttctgcctagggagtttggaggcaacttgggctgctatggaacagagagggcatgaaattgttctgctgtctcctgtagggaaaagacgcatgtccctctagtagctcacggctgcttttttttagccgtttattcttgagatggttagagattcaacctgaactgttgcgtatatagataaacccccacgttgcttatccattctgaagccccgaattatctctttcttgctgaaggtagcaacagtagatggtacttagtaggcttacccaagggcccaaaggctgccccgtgaaggcagagctgcccacactcagcttctgatgaagacccgactgaaagaggcaggcagcgcaccggaggacaaatcaggatcccaaacagtcatgataggttcgaactgtcagagtacagaacgtctggtgtgttagttcagctgcaggtacgtgattttagaaggcaattctgagaaggctgattcaactctgaaaagcatgtttgctaaagaatgatagaaataaatcagacatatgtagcttggaaaagtgaaaacgtaaaaggcttaatagttgttttcaaacactgaagagctgtcaaatgggaaagggattatagcagagtgcaagtgcagcaggcaggaatcataaggaggcgtatttcagcttaatacaagaaggagcattctggtgattggagtcatttgaaaaagatggaatggattgctttgaaaacctagcccactggtctgaggaactgtgtagagggaaagcttccggtggctatggagggtagctcggggctgaagcttgggaggctccctccgttccaggatgccatgtcaggtggttgaggctgcattttaaggagatgaattcctcaaagtggggcccagaccctcctccctgagaggctctttggccatcttaccatccccagtgctccttgtcacattctgagccccgtagaccgggtcctgtcggctgaatcatgagtgtaacttcctgccatcatttcggtttttcttgggctattcctatttcacaactgaccagaagccagccactggttaatagagaaaaacggactcactcagcatggtctgtttgtaaacttcactgtgtcatgcccagataatcaagaagtagggccaagggagagatttctctagacctctcggttgattgcagactgcttccctttctaccttccaagacaagactctgggattctgcctggtttaatctctgagatcaggattgaatctgtttcctgctaagaatcactcccttctctccatatctaagtccctataagtatcatttgttatttcttataacagctttattgagatacataactcccataccatgaaattcagcattttaaagtgtaaattcagtggctttgagcatattcacaaggctgtgcaactatcagcactgtctaatcccataacattttcaccgctccacagagaaactgcacacccgttaactgtcactctgcgtaccccaacccccaaccctaggcgaccactattctttctgtctccatggatttgcctatcctgggcatttcttataaatgggattatagaatacatggcctttggtgacgggctccttttacttagcacaatgatttaaaggttcatctgtgttgcagtctatatatatatatatatatatatatatatatatatatatatatacttttttttttttttttgagacagggtcttactctgctccccaggctggagtgcagtggtgtaatcatagctcattgcagcctccaactcctgggcttaaacaattcttccacctcaacctcctgagtagctgggactacaggcacatgctaccatgcccagttttgttttgttttgttttgttttgttttgagatggagttttactcttgttgcccaggctggaatgcaatggtgtgatctcggctcactgcaacctctgcctcctggggtcaaatgattcttctgtctcagcctcctgagtagctgggattacaggcgcccgcctggctagtttttgtatttttagtagagacagggtttcaccatgttggccaagcgggtctcgaactcctgacctcatgtgatccatgctccttggcctcccaaagtgctgggattacaggcatgagccaccacgcccagcttaatttttttcttttttaatgtttttgtagagatggggtactgctatgttgccaagctgttctgaaactcctggcttcaagtgatcctcctgtctcggcctcaaattgctgggattacaggtgtgagtcaccacgcctagtcactttttatggctgaataatattccattgtatggataataccacattttgattacccatttatccgctgatggatagtttggttgtttccaatttttgcctgttatgaataatgctgcaagaagcattcctatgtccatttttgtgtggacatatgttttcctttctcttgggtataaaggcatactttcgagatattgtgggtttgcagatttggttccaccgtactgcaataatactgcaataatgtgaataggcaataaagtgagttgcatggttttccagtgcatataaaagttatgctgcgggccgggcgcggtggctcacgcctgaaatcccagcactttgggaggcccaggcgggcggatcacgaggtcaggagttcaagaccagcctggccaagatggtgaaacctcgtctctactaaacatacaaaaaaaaaaaaaaaaaaactagccaggcgcggtggcaggtgcctgtaatcccagctactcgggaggctgaggcaggagaattgtttgaactcgggcagcagaggttgcagtgagctgagatcgtgccactgcactctggcctgggtgacagactgagactctgtctcaaaaaaaaaaaaaagttatgtttacactattctatagtctattaagtgtgtaataacattacatcttaaaaaaagtacatcccttaattaaaaatactttattgctaaaaaatgctgacacagaaacacaaagtaagtacatgctgttggaaaagtagcacggatagatttgtagcagggttgccacaaaccttcaatttgtaaaaaacgcaacaccggccaggcacggtggctcacgcctctaatcccagcactttgggaggcccaggcgggcggatcacgaggtcaggagatcgagaccatcctggctaacacggtgaaaccccatctccactaaaaacacaaaaaattagctgggcgcagtggtgtgcctttgtagtcccatataccggaggctgagacaggagaatggcgtgaacccgtgaggcggagcttgcggtgagccgagattgtgctactgcactccagcctgggtgacagagcgagactctctctcaaaaacaaacaaacaaacaaacaaaaaaacacaacacctgcacagcacaagaaagctgagcatagtaaaacgaggagctttgcctgtgttcttaggagtggaattgctgtgtcatatgggaactctacgtttaaccttgtgactgttagccttagactgccagactgttttccaaagcagctgcaccgcttaaccattcccacccacagtatgggagggttctggtttttccgtgttctcaccaagttgttattggctgtctttttgatgatagccatcccagtggaggtgatttgggcttgcatgtccctgatagctgagtattctgaaacagacattttactgaaatagaacatacattatatgaatgttgaggtggttcaccacagcagtaaaggggaacatagttgggattttctgctggaaaatgatctgcgtatttagagggaccgtgatgagtgtctggaattgtaggtgctgtagatgttgttcccagggctcctgagttaggaggcagtgtggatcctgtggaagagagaggaagacagcttggatttttctagacattgtaattctagttcatttttgactcctggcctctgccactgtctagctagataatggcagcagtaccgacagacagatgtgcagctcatagagcgtgagaaatggcatctgtgagggagacatttctgctaggatacaacgtcctactcttgataccatgatttcttccttagcctcattctgttcgactcccatgttctgtgtgtttctgaatgcctattctcccctccgctgaggtctcccgcctaggaatctgcaggtcacacaggctcttctgcagtggatattaatgcaggccaggaccggagggacttgtttttttgtgtttttttttcttttttttgagacagagtctcactctgtcgcccaggctggagtgcagtggcgcggtctcagctccctgcaagctccgcctcccgggttcacgccattctcctgcctcagcctcccgagtagctgggactacaggcgcccgccaccacgcccggctaattttttgtatttttagttgagacgaaggtttcaccgtgttggccaggctggtctcgatctcctgacctcgtggtccgcccgccccggcctcccaaagggctgggattacgggctgagccaccgcgccgggccagggacttgttttcttccgggtggtttcgcagggctgagctggggcccagcggcggaagtaaaacagcagatttcagcccattataaagagacgtttccaagcgttagagctacgggaagcgaagccccctgccccaggggtgtcagcagagccgtggcgtgcgggtccgtcgggggagacggggggaaggacaggtccccgggagaggagagcgcacccgcttaccgccctggcctcattctgcaggcagccgagagaccgccttcacccacgcggtgagcgccgcgggcgtggtcaacgccatcagccgggcctgccgcgagggcgagctctccacctgcggctgcagccggacggcgcggcccaaggacctgccccgggactggctgtggggcggctgtggggacaacgtggagtacggctaccgcttcgccaaggagtttgtggatgcccgggagcgagagaagaactttgccaaaggatcagaggagcagggccgggtgctcatgaacctgcaaaacaacgaggccggtcgcagggtaagctgggcctccccggcctccccagcactgcagacctagggggctgttcccgggctgtgccaccagccgtggcctggccttcaaggaaacgggttagtctgaccgtgaagattcttacctacgattgcaaatttacatgtccacgttattgaacaaatccttttcaaaatgccccacttcccaatgggcatacgtgctttttcttttcttttcttcttttctttttacttactttattatttcacggttcctagaggacttaggtgcaatgtttggatcagaattccagacgtaaggattagagcagcgctcttgtcttggccacccctcctttgcaacttgaatagataatgcgatgggatgtttaggccgttagacctcatctagggtttatgctctgttaaaggctctggtaatagcagagtcgactttcaagaactgctgtcatacgtatccagaacccagtcaaaaaacacattcaaatactaatgacaaacacacttctgagctaggagattttagacataagtggaagtgtgagaagacagccatctgtttaaggctggaggaaacagcctccccagtctcatgtaatgtgactgtcttttaagcctcagtttcagcagaagcaaccatgcaggtttgaggggagctgggttcattgtatgtgcagagcacacctgggcggcagcttctgggcccctaggtggcatgctggaaagcgtgaaccctctctgcctgcaccttgttcctgaaaaccccccctctgagcacacatccagcctcctcttttctttgctgtcccccatcgtggctgcctctgccacacaagactggagggcctgccccgcaggaatctctgccttttgctgcttctgcatagccagtgttgacagggaccgagggcaacatgggcgtccacccgggtttcctctgagaaaggtctgcggtctgagcactgggtggtgagaggctctttctcctggaaaaagagctctcaggaaacagcacggacttctttcttggagtgttgtccccactcgggtctatgtcaagccagctggctctggttcccaggcgaggtaatgtaacaaagatgaactcactcaaaaatgagaatggtggccgggagcagtggctcatgcctgtaatcccagcgctttgggaggccaaggcaggtggatcacttgaggccaggagttcgagaccagcctgaccaacatggtgaaaccctgtctctactaaaaatacaaaaaattagctggacttggtggcaggcacctgtaatcccagctacttgggaggctgaggcaggagaattgcttgaacctgggaggcggaggctgcagtgagcctagatcacaccattgcactccagcctgggcaacagagcaagactccatctcaaaaaaaaaaaaaaaatgagaatggcaatttcttagaagtttaacggtggcaccctggtgattcagtaacaggatatgaatataagcctcaaaatgtctttacatagcaaaatcttaaaatgtgaactcatgagaggcggggcacggtggctgatgcctgtaatcccaacactttgggaggctgaggcgggtggatcacctgaggtcaggagttcaagaccaggctggccaacatggtgaaaccccatctctagtaaaaatacaaaaagttagctggacgtggtggcacacgcttgtaatcccagctacttgggaggccgaggcaggagaattgcttgagccagaggttgcagtgagccaagatcctgccattgcactccagcctgggcaacagagcgagactctgtctcagaaaaaaatagaaagaaaaaagaaaagaaaaaaaatgtgaactcatatattggagcacatatcaaagaaatggaataggaagtgtcttttgtctgaatggggatgttgtagtattggccggatggaatgtggtgcacctgtgtgcatagcatcatcagccatgggacatcaggtggagaccagagtgggttatatgcccagggtcttccttacgcttcccctatccagaggctatttttgtttcccagaaaagggtgtgtgtaaggtggggtcagtgcgtggtgatgttaggagttctggcaattgctgatctgtgattatgataggctaacccagggcagagagcctggagccatctcagatgacttctgctcagggcgtgtgtggagccacccggtctctcaggtgtcttggctgtctcccagtctatttgcccacgtctttgggtgtctgggcctgaggagtagagatgtcaatgaaggggttaagatccgcactttatctcctgactgcccagagtcgatccagtttttgaaatcttagttgaaacactgccctccccagtccccattgttagtagtttttctcccacctgatcttcaatcgggcattcttgctcttctcaggtattccttactctatctacctttgccttggtaggttggcggtaggttcctgtgggcagggattgccctctctgcccctttgcttcaaccctgtatgtgctgtatgtgggtgggacaaatggatatacacagaggagttccgtgttgcctcctcgggagaggtcagattcacggaggctgcttgtggctctgctgagctgcgctgtggtgtctgcacgtgcctgtgatcaggcaggtgacacccactcttcccctttcccctgctgctgggtctcactttattgcccttaattgtttgttgtcttgtccgggctgttatctggcagccttccctcccatcaggcttgttcctggcttgctcaccttccctgtctgtctccccgcttagccccttccttcaggccccacacctctcctcttccttaactccttatctctccctttgcctctgcctgcttcaggttgggaattcctggccccctttattttttatcctctctccaaggaacaggcctcggccatcagtcaccatctgaggccagaggtattcactgcttgcctcctcacacctacacacaaagttctccagcaaggactgagtgatggctgggatggaaaatagacaagtattttagaaccatattaaaaagaaaaaaagattatccaggatctgatgtcttgacacagagtaaatcttaggctactttgccagaagtttctcttggcctgcaagagcatctagtagctccttcttagacggtggcggcaacaccagtggctgatggtgttttgccactcaaggatttctaagcattttccagataaaagcctggtgcctaatcctgtaacattcctgtctgtcaccaggctcagcacaccattagatagaagtggaagaggagctgagaggcgcttttccagggacagatcgtagaactaaaacttttttctttttttttgagacggagtttcgctcttgttgcccaggctggagtgcaatggcgcgatctcggctcactgcaaacctctgcttcccaggttcaagcgattcttctgcctcagcctccctagtagctgggattacaagcatgtgccaccacgcctgggctaattttgcatttttagtagagacggggtttctccatgttggtcaggctggtcttgaactcccgacctcaggtgatccgcccgccttggcctcctaaagtgctgggattacaggcataagccaccatgcccggcgaactaaaacatttttgaaagctttttttttttttttttttgctttttgaattagcagtctgggctgaaaatcggcatttccccctatcgcctacaaaaggagcctatatatatatatatatatctacaaaaggagattttgtatatatacatatatatatataaaatcagtagtaaaatatgaaaaaaattgcagatattcctatctctacaatgtctttgaattcagggaaggatggagggggtgtttaagctggtgcacttcctcttggatttgttttcctaaaattctggtccttgccctgcagggtcttgctccgactctccttccccaactctgtctgagtgtttgcccctgcaagagatgcttatccgtgctccgagttgctaagtggcaaagtgcacagtttccaacccttaatgtttcctcctctcagcagtgccagacgcctgtcatccatctctaagccaaggaccatttccagaggaatgtcaggctgcagctcagacccagggcatttgggatggaagggtcattgcaggccccatctttgaagtgtctgtcaggatggggtgtcagttcctttatgtcttggacctggagctgcccggctaagtgctggtgcctttaaccttggggagagccttccttcctcctctgctctaagccagctttaagccccgagattggagtggataagtgcttgttattctgagtcctttctgggtggccttggaggttagtgagcctctctagagcttcagtttctccaccataaaatagtgggaataattccgtaccagaaaaaactcaggaagacttttgccaacagtcatatgcactgatgatggctgtgctgtctcttgcacctgcagtggtctctgcttagctctgaataaagacacaatctgggggctcttgaaaagaaatctaagagaaacccttgaaaaatgagtcctgactcagttggtgacaatagccatgcataagaaaatgctctgcagccggcttgcgttttcatcccgccatctgcacgtctaggcctgctgccagggttggttgccatggtgcgtcagcatgctgccgttgaaaagcactctgtaagcagctttctggtctgctcttgcttttacattttgatttgggataactcaagttcaaatctactccacgttgtggcggttctgtgacttctggggtagacttgttttagatgaaccgctcctgcaggcaggcccagctgcttgcagttcccttgcacgttgcttcactgtgttactccagctctcccaagggggcgtctgggggctgctcgggaggaagacggtggtcttgctcacaaatggatggtgtatggcaagactcctgatgactctatggagttagtgactacatggtaacatggggaaagggaccatttaattctcagggtatttgacaggatcagggagagttttgggctaaccacggctatgccagtgatttctgtgataggcttgtgatacaattggattcttttttctgacttgtgctcctattacgcaaaagctggacacattttgttattttgttttgttttgctttgtttctagagatggagtcttgccctgttgcccaggctggagtgcagtggcacaagcatagcttgctgcatcctcaaattcctgggctcaagtgatcctccttcctcagcctccccagtagctgggactacaggcaccagccacagtgcctggctgtattttgttggttattatttatttgtttgaggctttgatcaagatggagatatctttgttttccgattgtgaaaaggatgcattgattgtaacaggttttgaggaatgagaaaccagtagagtagaaagtgaaagtgcctggtgccatcctcccggctgatggggacaagttgccttgccgccccagggttcttttctgtggtgcctcttttatgttttccccctgagcacctgagcatcttggaaagatctttgcatgcatttgaaaagctatctatcccctaccctaccggcccctcctgtgtactaggcctgtggctaccccagccaccctctgggcctcttccaccgggatcctccttcttactgccttctttctcttcccctaggctgtgtataagatggcagacgtagcctgcaaatgccacggcgtctcggggtcctgcagcctcaagacctgctggctgcagctggccgagttccgcaaggtcggggaccggctgaaggagaagtacgacagcgcggccgccatgcgcgtcacccgcaagggccggctggagctggaacagccgcttcacccagcccaccccggaggacctggtctatgtggaccccagccccgactactgcctgcgcaacgagagcacgggctccctgggcacgcagggccgcctctgcaacaagacctcggagggcatggatggctgtgagctcatgtgctgcgggcgtggctacaaccagttcaagagcgtgcaggtggagcgctgccactgcaagttccactggtgctgcttcgtcaggtgtaagaagtgcacggagatcgtggaccagtacatctgtaaatagcccggagggcctgctcccggcccccctgcactctgcctcacaaaggtctatattatataaatctatataaatctattttatatttgtataagtaaatgggtgggtgctatacaat

SEQ ID NO: 7 - RNA, 1437 nt, homo sapien
aaaugcuccagauccucaguguucaagaaccucaggaagcuucgcaguccugccucgugccugcuugaacagcuggaugugggcaggaggcugugggagcgggccaugccagcagaaucccgccuuacucuggggacuuacucuugucacagccccugguguccugagggucauuucagugucauggaacccuacucuggaaacugucagucccagggcacuggggagggcugaggccgaccaugcccagccugcugcugcuguucacggcugcucugcuguccagcugggcucagcuucugacagacgccaacuccugguggucauuagcuuugaacccggugcagagacccgagauguuuaucaucggugcccagcccgugugcagucagcuucccgggcucuccccuggccagaggaagcugugccaauuguaccaggagcacauggccuacauaggggagggagccaagacuggcaucaaggaaugccagcaccaguuccggcagcggcgguggaauugcagcacagcggacaacgcaucugucuuugggagagucaugcagauaggcagccgagagaccgccuucacccacgcggugagcgccgcgggcguggucaacgccaucagccgggccugccgcgagggcgagcucuccaccugcggcugcagccggacggcgcggcccaaggaccugccccgggacuggcuguggggcggcuguggggacaacguggaguacggcuaccgcuucgccaaggaguuuguggaugcccgggagcgagagaagaacuuugccaaaggaucagaggagcagggccgggugcucaugaaccugcaaaacaacgaggccggucgcagggcuguguauaagauggcagacguagccugcaaaugccacggcgucucgggguccugcagccucaagaccugcuggcugcagcuggccgaguuccgcaaggucggggaccggcugaaggagaaguacgacagcgcggccgccaugcgcgucacccgcaagggccggcuggagcuggucaacagccgcuucacccagcccaccccggaggaccuggucuauguggaccccagccccgacuacugccugcgcaacgagagcacgggcucccugggcacgcagggccgccucugcaacaagaccucggagggcauggauggcugugagcucaugugcugcgggcguggcuacaaccaguucaagagcgugcagguggagcgcugccacugcaaguuccacuggugcugcuucgucagguguaagaagugcacggagaucguggaccaguacaucuguaaauagcccggagggccugcucccggccccccugcacucugccucacaaaggucuauauuauauaaaucuauauaaaucuauuuuauauuuguauaaguaaaugggugggugcuauacaau

SEQ ID NO: 8 - RNA, 2184 nt, homo sapien
uauucuuccaaauggaaacugcuaauuuuugaagcagaagguugacagcuucaguaagaucucaagagagcgagaagacuggaaucagggaacccuacucuggaaacugucagucccagggcacuggggagggcugaggccgaccaugcccagccugcugcugcuguucacggcugcucugcuguccagcugggcucagcuucugacagacgccaacuccugguggucauuagcuuugaacccggugcagagacccgagauguuuaucaucggugcccagcccgugugcagucagcuucccgggcucuccccuggccagaggaagcugugccaauuguaccaggagcacauggccuacauaggggagggagccaagacuggcaucaaggaaugccagcaccaguuccggcagcggcgguggaauugcagcacagcggacaacgcaucugucuuugggagagucaugcagauaggcagccgagagaccgccuucacccacgcggugagcgccgcgggcguggucaacgccaucagccgggccugccgcgagggcgagcucuccaccugcggcugcagccggacggcgcggcccaaggaccugccccgggacuggcuguggggcggcuguggggacaacguggaguacggcuaccgcuucgccaaggaguuuguggaugcccgggagcgagagaagaacuuugccaaaggaucagaggagcagggccgggugcucaugaaccugcaaaacaacgaggccggucgcagggcuguguauaagauggcagacguagccugcaaaugccacggcgucucgggguccugcagccucaagaccugcuggcugcagcuggccgaguuccgcaaggucggggaccggcugaaggagaaguacgacagcgcggccgccaugcgcgucacccgcaagggccggcuggagcuggucaacagccgcuucacccagcccaccccggaggaccuggucuauguggaccccagccccgacuacugccugcgcaacgagagcacgggcucccugggcacgcagggccgccucugcaacaagaccucggagggcauggauggcugugagcucaugugcugcgggcguggcuacaaccaguucaagagcgugcagguggagcgcugccacugcaaguuccacuggugcugcuucgucagguguaagaagugcacggagaucguggaccaguacaucuguaaauagcccggagggccugcucccggccccccugcacucugccucacaaaggucuauauuauauaaaucuauauaaaucuauuuuauauuuguauaaguaaaugggugggugcuauacaauggaaagaugaaaauggaaaggaagagcuuauuuaagagacgcuggagaucucugaggaguggacuuugcugguucucuccucuuggugggugggagacagggcuuuuucucucccucuggcgaggacucucaggauguagggacuuggaaauauuuacugucuguccaccacggccuggaggagggagguugugguuggauggaggagaugaucuugucuggaagucuagagucuuuguugguuagaggacugccugugauccuggccacuaggccaagaggcccuaugaagguggcgggaacucagcuucaaccucgaugucuucagggucuuguccagaauguagauggguuccguaagaggccuggugcucucuuacucuuucauccacgugcacuugugcggcaucugcaguuuacaggaacggcuccuucccuaaaaugagaaguccaaggucaucucuggcccagugaccacagagagaucugcaccucccggacuucaggccugccuuuccagcgagaauucuucauccuccacgguucacuagcuccuaccugaagaggaaagggggccauuugaccugacaugucaggaaagcccuaaacugaauguuugcgccugggcugcagaagccagggugcaugaccaggcugcguggacguuauacugucuucccccacccccggggaggggaagcuugagcugcugcugucacuccuccaccgagggaggccucacaaaccacaggacgcugcaacgggucaggcuggcgggcccggcgugcucaucaucucugccccagguguacgguuucucucugacauuaaaugcccuucaugg

SEQ ID NO: 9 - RNA, 2238 nt, homo sapien
agucacagccacagugaccauuagcaggcacccaggccugucuuuggcucggaaacgguggcccccaauguagccuaguuugaaccuaggaacugcaggaccagagagauuccacuggagccugauggacgggugacagagggaacccuacucuggaaacugucagucccagggcacuggggagggcugaggccgaccaugcccagccugcugcugcuguucacggcugcucugcuguccagcugggcucagcuucugacagacgccaacuccugguggucauuagcuuugaacccggugcagagacccgagauguuuaucaucggugcccagcccgugugcagucagcuucccgggcucuccccuggccagaggaagcugugccaauuguaccaggagcacauggccuacauaggggagggagccaagacuggcaucaaggaaugccagcaccaguuccggcagcggcgguggaauugcagcacagcggacaacgcaucugucuuugggagagucaugcagauaggcagccgagagaccgccuucacccacgcggugagcgccgcgggcguggucaacgccaucagccgggccugccgcgagggcgagcucuccaccugcggcugcagccggacggcgcggcccaaggaccugccccgggacuggcuguggggcggcuguggggacaacguggaguacggcuaccgcuucgccaaggaguuuguggaugcccgggagcgagagaagaacuuugccaaaggaucagaggagcagggccgggugcucaugaaccugcaaaacaacgaggccggucgcagggcuguguauaagauggcagacguagccugcaaaugccacggcgucucgggguccugcagccucaagaccugcuggcugcagcuggccgaguuccgcaaggucggggaccggcugaaggagaaguacgacagcgcggccgccaugcgcgucacccgcaagggccggcuggagcuggucaacagccgcuucacccagcccaccccggaggaccuggucuauguggaccccagccccgacuacugccugcgcaacgagagcacgggcucccugggcacgcagggccgccucugcaacaagaccucggagggcauggauggcugugagcucaugugcugcgggcguggcuacaaccaguucaagagcgugcagguggagcgcugccacugcaaguuccacuggugcugcuucgucagguguaagaagugcacggagaucguggaccaguacaucuguaaauagcccggagggccugcucccggccccccugcacucugccucacaaaggucuauauuauauaaaucuauauaaaucuauuuuauauuuguauaaguaaaugggugggugcuauacaauggaaagaugaaaauggaaaggaagagcuuauuuaagagacgcuggagaucucugaggaguggacuuugcugguucucuccucuuggugggugggagacagggcuuuuucucucccucuggcgaggacucucaggauguagggacuuggaaauauuuacugucuguccaccacggccuggaggagggagguugugguuggauggaggagaugaucuugucuggaagucuagagucuuuguugguuagaggacugccugugauccuggccacuaggccaagaggcccuaugaagguggcgggaacucagcuucaaccucgaugucuucagggucuuguccagaauguagauggguuccguaagaggccuggugcucucuuacucuuucauccacgugcacuugugcggcaucugcaguuuacaggaacggcuccuucccuaaaaugagaaguccaaggucaucucuggcccagugaccacagagagaucugcaccucccggacuucaggccugccuuuccagcgagaauucuucauccuccacgguucacuagcuccuaccugaagaggaaagggggccauuugaccugacaugucaggaaagcccuaaacugaauguuugcgccugggcugcagaagccagggugcaugaccaggcugcguggacguuauacugucuucccccacccccggggaggggaagcuugagcugcugcugucacuccuccaccgagggaggccucacaaaccacaggacgcugcaacgggucaggcuggcgggcccggcgugcucaucaucucugccccagguguacgguuucucucugacauuaaaugcccuucaugga

SEQ ID NO: 10 - RNA, 508 nt, homo sapien
acugucagucccagggcacuggggagggcugaggccgaccaugcccagccugcugcugcuguucacggcugcucugcuguccagcugggcucagcuucugacagacgccaacuccugguggucauuagcuuugaacccggugcagagacccgagauguuuaucaucggugcccagcccgugugcagucagcuucccgggcucuccccuggccagaggaagcugugccaauuguaccaggagcacauggccuacauaggggagggagccaagacuggcaucaaggaaugccagcaccaguuccggcagcggcgguggaauugcagcacagcggacaacgcaucugucuuugggagagucaugcagauaggcuguguauaagauggcagacguagccugcaaaugccacggcgucucgggguccugcagccucaagaccugcuggcugcagcuggccgaguuccgcaaggucggggaccggcugaaggagaaguacgacagcgcggccgc

SEQ ID NO: 11 - RNA, 2190 nt, homo sapien
uauucuuccaaauggaaacugcuaauuuuugaagcagaagguugacagcuucaguaagaucucaagagagcgagaagacuggaaucagggaacccuacucuggaaacugucagucccagggcacuggggagggcugaggccgaccaugcccagccugcugcugcuguucacggcugcucugcuguccagcugggcucagcuucugacagacgccaacuccugguggucuuuagcuuugaacccggugcagagacccgagauguuuaucaucggugcccagcccgugugcagucagcuucccgggcucuccccuggccagaggaagcugugccaauuguaccaggagcacauggccuacauaagggagggagccaagacuggcaucaaggaaugccagcaccaguuuccgcagcggcgguggaagugcagcacagcggacaacgcaucugucuuugggagagucaugcagauaggcagccgagagaccgccuucacccacgcggugagcgccgcgggcguggucaacgccaucagccgggccugccgcgagggagagcucuccaccugcggcugcagccggacggcgcggcccaaggaccugccccgggacuggcuguggggcggcuguggggacaacguggaguacggcuaccgcuuugccaaggaguuuguggaugcccgggagcgagagaagaacuuugccaagggaucagaggagcagggccgggugcucaugaaccugcaaaacaacgaggccggucgcagggcuguguauaagauggcagacguagccugcaaaugucacggagucucucggucaugcaggcucaagaccugcuggcugcagcuggccgaguuccgcaaggucggggaccggcugaaggagaaguacgacagcgcggccgccaugcgcgucacccgcaagggccggcuggagcuggucaacagccgcuucacccagcccaccccggaggaccuggucuauguggaccccagccccgacuacugccugcgcaacgagagcacgggcucccugggcacgcagggccgccucugcaacaagaccucggagggcauggauggcugugagcucaugugcugcgggcguggcuacaaccaguucaagagcgugcagguggagcgcugccacugcaaguuccacuggugcugcuucgucagguguaagaagugcacggagaucguggaccaguacaucuguaaauaaccggaggcugcuucccgggccccccuugcacucugccucacaaaggucuauauuauauaaaucuauauuaaaucuauuuuaauauuuguuauaaguaaaugggugggugcuauacaauggaaagauggaaauggaaagggaagagcuuauuuaagagacgcuggagaucucugaggaguggacuuugcugguucucuccucuuggugggugggagacagggcuuuuucucucccucuggugaggacucucaggauguagggacuuggaaauauuuacugucuguccaccacggccuggaggagggagguugugguuggauggaggagaugaucuugucuggaagucuagagucuuuguugguuagaggacugccugugauccuggccacuagccaagaggcccuaugaagguggcgggaacucagcuucaaccucgaugucuucagggucuuguccagaauguagauggguuccguaagaggccuggugcucucuuacucuuucauccacgugcacuugugcggcaucugcaguuuacaggaacggcuccuucccuaaaaugagaaguccaaggucaucucuggcccagugaccacagagagaucugcaccucccggacuucaggccugccuuuccagcgagaauucuucauccuccacgguucacuagcuccuaccugaagaggaaagggggccauuugaccugacaugucaggaaagcccuaaacugaauguuugcgccugggcugcagaagccagggugcaugaccaggcugcguggacguuauacugucuucccccacccccggggaggggaagcuugagcugcugcugucacuccuccaccgagggaggccucacaaaccacaggacgcugcaacgggucaggcuggcgggcccggcgugcucaucaucucugccccagguguacgguuucucucugacauuuaaaugcccuucaugggg

SEQ ID NO: 12 - RNA, 2252 nt, homo sapien
gaccauuagcaggcacccaggccugucuuuggcucggaaacgguggcccccaauguagccuaguuugaaccuaggaacugcaggaccagagagauuccacuggagccugauggacgggugacagagggaacccuacucuggaaacugucagucccagggcacuggggagggcugaggccgaccaugcccagccugcugcugcuguucacggcugcucugcuguccagcugggcucagcuucugacagacgccaacuccugguggucauuagcuuugaacccggugcagagacccgagauguuuaucaucggugcccagcccgugugcagucagcuucccgggcucuccccuggccagaggaagcugugccaauuguaccaggagcacauggccuacauaggggagggagccaagacuggcaucaaggaaugccagcaccaguuccggcagcggcgguggaauugcagcacagcggacaacgcaucugucuuugggagagucaugcagauaggcagccgagagaccgccuucacccacgcggugagcgccgcgggcguggucaacgccaucagccgggccugccgcgagggcgagcucuccaccugcggcugcagccggacggcgcggcccaaggaccugccccgggacuggcuguggggcggcuguggggacaacguggaguacggcuaccgcuucgccaaggaguuuguggaugcccgggagcgagagaagaacuuugccaaaggaucagaggagcagggccgggugcucaugaaccugcaaaacaacgaggccggucgcagggcuguguauaagauggcagacguagccugcaaaugccacggcgucucgggguccugcagccucaagaccugcuggcugcagcuggccgaguuccgcaaggucggggaccggcugaaggagaaguacgacagcgcggccgccaugcgcgucacccgcaagggccggcuggagcuggucaacagccgcuucacccagcccaccccggaggaccuggucuauguggaccccagccccgacuacugccugcgcaacgagagcacgggcucccugggcacgcagggccgccucugcaacaagaccucggagggcauggauggcugugagcucaugugcugcgggcguggcuacaaccaguucaagagcgugcagguggagcgcugccacugcaaguuccacuggugcugcuucgucagguguaagaagugcacggagaucguggaccaguacaucuguaaauagcccggagggccugcucccggcccccccugcacucugccucacaaaggucuauauuauauaaaucuauauaaaucuauuuuauauuuguauaaguaaaugggugggugcuauacaauggaaagaugaaaauggaaaggaagagcuuauuuaagagacgcuggagaucucugaggaguggacuuugcugguucucuccucuuggugggugggagacagggcuuuuucucucccucuggcgaggacucucaggauguagggacuuggaaauauuuacugucuguccaccacggccuggaggagggagguugugguuggauggaggagaugaucuugucuggaagucuagagucuuuguugguuagaggacugccugugauccuggccacuaggccaagaggcccuaugaagguggcgggaacucagcuucaaccucgaugucuucagggucuuguccagaauguagauggguuccguaagaggccuggugcucucuuacucuuucauccacgugcacuugugcggcaucugcaguuuacaggaacggcuccuucccuaaaaugagaaguccaaggucaucucuggcccagugaccacagagagaucugcaccucccggacuucaggccugccuuuccagcgagaauucuucauccuccacgguucacuagcuccuaccugaagaggaaagggggccauuugaccugacaugucaggaaagcccuaaacugaauguuugcgccugggcugcagaagccagggugcaugaccaggcugcguggacguuauacugucuucccccacccccggggaggggaagcuugagcugcugcugucacuccuccaccgagggaggccucacaaaccacaggacgcugcaacgggucaggcuggcgggcccggcgugcucaucaucucugccccagguguacgguuucucucugacauuaaaugcccuucauggaaaaaaaaaaaagaaaaaaaaaaaaaaaa

SEQ ID NO: 13 - RNA, 1304 nt, homo sapien
caauucaccaaaauguuuuaauccuacaaaggagagccugagggucagagaaauaagucucugggcuggaaugagagguaggcacgugggggaguggauaggaugggccccauuucuuuggauguucugcagcaaggacagguaugcuuuacaacagccgaaguggccucccggcugccgaacggaggaacgccgcaagcuccgcucuugaaauuacuuguuuucauuucucuuugugguuucucagcucauuauuucuuuggaaauuagguccugugcaggguucccacaguuugggguaagagacagaaguccuagggugggaagaugagcagugggaggcggaggcuggaaagaggccgagcuucuuuguggggaacacgcagcacguaagcaucagugcaacuuucuccgccucaccccggcuccuggucugcccuuauccgcugaguuuccacacugacucuccauuucuguuuucuccagggaacccuacucuggaaacugucagucccagggcacuggggagggcugaggccgaccaugcccagccugcugcugcuguucacggcugcucugcuguccagcugggcucagcuucugacagacgccaacuccugguggucauuagcuuugaacccggugcagagacccgagauguuuaucaucggugcccagcccgugugcagucagcuucccgggcucuccccuggccagaggaagcugugccaauuguaccaggagcacauggccuacauaggggagggagccaagacuggcaucaaggaaugccagcaccaguuccggcagcggcgguggaauugcagcacagcggacaacgcaucugucuuugggagagucaugcagauaggcagccgagagaccgccuucacccacgcggugagcgccgcgggcguggucaacgccaucagccgggccugccgcgagggcgagcucuccaccugcggcugcagccggacggcgcggcccaaggaccugccccgggacuggcuguggggcggcuguggggacaacguggaguacggcuaccgcuucgccaaggaguuuguggaugcccgggagcgagagaagaacuuugccaaaggaucagaggagcagggccgggugcucaugaaccugcaaaacaacgaggccggucgcagggcuguguauaagauggcagacguagccugcaaaugccacggcgucucgggguccugcagccucaagaccugcuggcugcagcuggccgaguuccgcaaggucggggaccggcugaaggagaaguacgacagcgcggccgc

SEQ ID NO: 14 - RNA, 1560 nt, homo sapien
cgaccaugcccagccugcugcugcuguucacggcugcucugcuguccagcugggcucagcuucugacagacgccaacuccugguggucauuagcuuugaacccggugcagagacccgagauguuuaucaucggugcccagcccgugugcagucagcuucccgggcucuccccuggccagaggaagcugugccaauuguaccaggagcacauggccuacauaggggagggagccaagacuggcaucaaggaaugccagcaccaguuccggcagcggcgguggaauugcagcacagcggacaacgcaucugucuuugggagagucaugcagauaggcagccgagagaccgccuucacccacgcggugagcgccgcgggcguggucaacgccaucagccgggccugccgcgagggcgagcucuccaccugcggcugcagccggacggcgcggcccaaggaccugccccgggacuggcuguggggcggcuguggggacaacguggaguacggcuaccgcuucgccaaggaguuuguggaugcccgggagcgagagaagaacuuugccaaaggaucagaggagcagggccgggugcucaugaaccugcaaaacaacgaggccggucgcagggcuguguauaagauggcagacguagccugcaaaugccacggcgucucgggguccugcagccucaagaccugcuggcugcagcuggccgaguuccgcaaggucggggaccggcugaaggagaaguacgacagcgcggccgccaugcgcgucacccgcaagggccggcuggagcuggucaacagccgcuucacccagcccaccccggaggaccuggucuauguggaccccagccccgacuacugccugcgcaacgagagcacgggcucccugggcacgcagggccgccucugcaacaagaccucggagggcauggauggcugugagcucaugugcugcgggcguggcuacaaccaguucaagagcgugcagguggagcgcugccacugcaaguuccacuggugcugcuucgucagguguaagaagugcacggagaucguggaccaguacaucuguaaauagcccggagggccugcucccggccccccugcacucugccucacaaaggucuauauuauauaaaucuauauaaaucuauuuuauauuuguauaaguaaaugggugggugcuauacaauggaaagaugaaaauggaaaggaagagcuuauuuaagagacgcuggagaucucugaggaguggacuuugcugguucucuccucuuggugggugggagacagggcuuuuucucucccucuggugaggacucucaggauguagggacuuggaaauauuuacugucuguccaccacggccuggaggagggagguugugguuggauggaggagaugaucuugucuggaagucuagagucuuuguugguuagaggacugccugugauccuggccacuaggccaagaggcccuaugaagguggcgggaacucagcuucaaccucgaugucuucagggucuuguccagaauguagauggguuccguaa

SEQ ID NO: 15 - RNA, 1437 nt, homo sapien
aaaugcuccagauccucaguguucaagaaccucaggaagcuucgcaguccugccucgugccugcuugaacagcuggaugugggcaggaggcugugggagcgggccaugccagcagaaucccgccuuacucuggggacuuacucuugucacagccccugguguccugagggucauuucagugucauggaacccuacucuggaaacugucagucccagggcacuggggagggcugaggccgacuaugcccagccugcugcugcuguucacggcugcucugcuguccagcugggcucagcuucugacagacgccaacuccugguggucauuagcuuugaacccggugcagagacccgagauguuuaucaucggugcccagcccgugugcagucagcuucccgggcucuccccuggccagaggaagcugugccaauuguaccaggagcacauggccuacauaggggagggagccaagacuggcaucaaggaaugccagcaccaguuccggcagcggcgguggaauugcagcacagcggacaacgcaucugucuuugggagagucaugcagauaggcagccgagagaccgccuucacccacgcggugagcgccgcgggcguggucaacgccaucagccgggccugccgcgagggcgagcucuccaccugcggcugcagccggacggcgcggcccaaggaccugccccgggacuggcuguggggcggcuguggggacaacguggaguacggcuaccgcuucgccaaggaguuuguggaugcccgggagcgagagaagaacuuugccaaaggaucagaggagcagggccgggugcucaugaaccugcaaaacaacgaggccggucgcagggcuguguauaagauggcagacguagccugcaaaugccacggcgucucgggguccugcagccucaagaccugcuggcugcagcuggccgaguuccgcaaggucggggaccggcugaaggagaaguacgacagcgcggccgccaugcgcgucacccgcaagggccggcuggagcuggucaacagccgcuucacccagcccaccccggaggaccuggucuauguggaccccagccccgacuacugccugcgcaacgagagcacgggcucccugggcacgcagggccgccucugcaacaagaccucggagggcauggauggcugugagcucaugugcugcgggcguggcuacaaccaguucaagagcgugcagguggagcgcugccacugcaaguuccacuggugcugcuucgucagguguaagaagugcacggagaucguggaccaguacaucuguaaauagcccggagggccugcucccggccccccugcacucugccucacaaaggucuauauuauauaaaucuauauaaaucuauuuuauauuuguauaaguaaaugggugggugcuauacaau

SEQ ID NO: 16 - RNA, 2184 nt, homo sapien
uauucuuccaaauggaaacugcuaauuuuugaagcagaagguugacagcuucaguaagaucucaagagagcgagaagacuggaaucagggaacccuacucuggaaacugucagucccagggcacuggggagggcugaggccgacuaugcccagccugcugcugcuguucacggcugcucugcuguccagcugggcucagcuucugacagacgccaacuccugguggucauuagcuuugaacccggugcagagacccgagauguuuaucaucggugcccagcccgugugcagucagcuucccgggcucuccccuggccagaggaagcugugccaauuguaccaggagcacauggccuacauaggggagggagccaagacuggcaucaaggaaugccagcaccaguuccggcagcggcgguggaauugcagcacagcggacaacgcaucugucuuugggagagucaugcagauaggcagccgagagaccgccuucacccacgcggugagcgccgcgggcguggucaacgccaucagccgggccugccgcgagggcgagcucuccaccugcggcugcagccggacggcgcggcccaaggaccugccccgggacuggcuguggggcggcuguggggacaacguggaguacggcuaccgcuucgccaaggaguuuguggaugcccgggagcgagagaagaacuuugccaaaggaucagaggagcagggccgggugcucaugaaccugcaaaacaacgaggccggucgcagggcuguguauaagauggcagacguagccugcaaaugccacggcgucucgggguccugcagccucaagaccugcuggcugcagcuggccgaguuccgcaaggucggggaccggcugaaggagaaguacgacagcgcggccgccaugcgcgucacccgcaagggccggcuggagcuggucaacagccgcuucacccagcccaccccggaggaccuggucuauguggaccccagccccgacuacugccugcgcaacgagagcacgggcucccugggcacgcagggccgccucugcaacaagaccucggagggcauggauggcugugagcucaugugcugcgggcguggcuacaaccaguucaagagcgugcagguggagcgcugccacugcaaguuccacuggugcugcuucgucagguguaagaagugcacggagaucguggaccaguacaucuguaaauagcccggagggccugcucccggccccccugcacucugccucacaaaggucuauauuauauaaaucuauauaaaucuauuuuauauuuguauaaguaaaugggugggugcuauacaauggaaagaugaaaauggaaaggaagagcuuauuuaagagacgcuggagaucucugaggaguggacuuugcugguucucuccucuuggugggugggagacagggcuuuuucucucccucuggcgaggacucucaggauguagggacuuggaaauauuuacugucuguccaccacggccuggaggagggagguugugguuggauggaggagaugaucuugucuggaagucuagagucuuuguugguuagaggacugccugugauccuggccacuaggccaagaggcccuaugaagguggcgggaacucagcuucaaccucgaugucuucagggucuuguccagaauguagauggguuccguaagaggccuggugcucucuuacucuuucauccacgugcacuugugcggcaucugcaguuuacaggaacggcuccuucccuaaaaugagaaguccaaggucaucucuggcccagugaccacagagagaucugcaccucccggacuucaggccugccuuuccagcgagaauucuucauccuccacgguucacuagcuccuaccugaagaggaaagggggccauuugaccugacaugucaggaaagcccuaaacugaauguuugcgccugggcugcagaagccagggugcaugaccaggcugcguggacguuauacugucuucccccacccccggggaggggaagcuugagcugcugcugucacuccuccaccgagggaggccucacaaaccacaggacgcugcaacgggucaggcuggcgggcccggcgugcucaucaucucugccccagguguacgguuucucucugacauuaaaugcccuucaugg

SEQ ID NO: 17 - RNA, 2238 nt, homo sapien
agucacagccacagugaccauuagcaggcacccaggccugucuuuggcucggaaacgguggcccccaauguagccuaguuugaaccuaggaacugcaggaccagagagauuccacuggagccugauggacgggugacagagggaacccuacucuggaaacugucagucccagggcacuggggagggcugaggccgacuaugcccagccugcugcugcuguucacggcugcucugcuguccagcugggcucagcuucugacagacgccaacuccugguggucauuagcuuugaacccggugcagagacccgagauguuuaucaucggugcccagcccgugugcagucagcuucccgggcucuccccuggccagaggaagcugugccaauuguaccaggagcacauggccuacauaggggagggagccaagacuggcaucaaggaaugccagcaccaguuccggcagcggcgguggaauugcagcacagcggacaacgcaucugucuuugggagagucaugcagauaggcagccgagagaccgccuucacccacgcggugagcgccgcgggcguggucaacgccaucagccgggccugccgcgagggcgagcucuccaccugcggcugcagccggacggcgcggcccaaggaccugccccgggacuggcuguggggcggcuguggggacaacguggaguacggcuaccgcuucgccaaggaguuuguggaugcccgggagcgagagaagaacuuugccaaaggaucagaggagcagggccgggugcucaugaaccugcaaaacaacgaggccggucgcagggcuguguauaagauggcagacguagccugcaaaugccacggcgucucgggguccugcagccucaagaccugcuggcugcagcuggccgaguuccgcaaggucggggaccggcugaaggagaaguacgacagcgcggccgccaugcgcgucacccgcaagggccggcuggagcuggucaacagccgcuucacccagcccaccccggaggaccuggucuauguggaccccagccccgacuacugccugcgcaacgagagcacgggcucccugggcacgcagggccgccucugcaacaagaccucggagggcauggauggcugugagcucaugugcugcgggcguggcuacaaccaguucaagagcgugcagguggagcgcugccacugcaaguuccacuggugcugcuucgucagguguaagaagugcacggagaucguggaccaguacaucuguaaauagcccggagggccugcucccggccccccugcacucugccucacaaaggucuauauuauauaaaucuauauaaaucuauuuuauauuuguauaaguaaaugggugggugcuauacaauggaaagaugaaaauggaaaggaagagcuuauuuaagagacgcuggagaucucugaggaguggacuuugcugguucucuccucuuggugggugggagacagggcuuuuucucucccucuggcgaggacucucaggauguagggacuuggaaauauuuacugucuguccaccacggccuggaggagggagguugugguuggauggaggagaugaucuugucuggaagucuagagucuuuguugguuagaggacugccugugauccuggccacuaggccaagaggcccuaugaagguggcgggaacucagcuucaaccucgaugucuucagggucuuguccagaauguagauggguuccguaagaggccuggugcucucuuacucuuucauccacgugcacuugugcggcaucugcaguuuacaggaacggcuccuucccuaaaaugagaaguccaaggucaucucuggcccagugaccacagagagaucugcaccucccggacuucaggccugccuuuccagcgagaauucuucauccuccacgguucacuagcuccuaccugaagaggaaagggggccauuugaccugacaugucaggaaagcccuaaacugaauguuugcgccugggcugcagaagccagggugcaugaccaggcugcguggacguuauacugucuucccccacccccggggaggggaagcuugagcugcugcugucacuccuccaccgagggaggccucacaaaccacaggacgcugcaacgggucaggcuggcgggcccggcgugcucaucaucucugccccagguguacgguuucucucugacauuaaaugcccuucaugga

SEQ ID NO: 18 - RNA, 508 nt, homo sapien
acugucagucccagggcacuggggagggcugaggccgacuaugcccagccugcugcugcuguucacggcugcucugcuguccagcugggcucagcuucugacagacgccaacuccugguggucauuagcuuugaacccggugcagagacccgagauguuuaucaucggugcccagcccgugugcagucagcuucccgggcucuccccuggccagaggaagcugugccaauuguaccaggagcacauggccuacauaggggagggagccaagacuggcaucaaggaaugccagcaccaguuccggcagcggcgguggaauugcagcacagcggacaacgcaucugucuuugggagagucaugcagauaggcuguguauaagauggcagacguagccugcaaaugccacggcgucucgggguccugcagccucaagaccugcuggcugcagcuggccgaguuccgcaaggucggggaccggcugaaggagaaguacgacagcgcggccgc

SEQ ID NO: 19 - RNA, 2190 nt, homo sapien
uauucuuccaaauggaaacugcuaauuuuugaagcagaagguugacagcuucaguaagaucucaagagagcgagaagacuggaaucagggaacccuacucuggaaacugucagucccagggcacuggggagggcugaggccgacuaugcccagccugcugcugcuguucacggcugcucugcuguccagcugggcucagcuucugacagacgccaacuccugguggucuuuagcuuugaacccggugcagagacccgagauguuuaucaucggugcccagcccgugugcagucagcuucccgggcucuccccuggccagaggaagcugugccaauuguaccaggagcacauggccuacauaagggagggagccaagacuggcaucaaggaaugccagcaccaguuuccgcagcggcgguggaagugcagcacagcggacaacgcaucugucuuugggagagucaugcagauaggcagccgagagaccgccuucacccacgcggugagcgccgcgggcguggucaacgccaucagccgggccugccgcgagggagagcucuccaccugcggcugcagccggacggcgcggcccaaggaccugccccgggacuggcuguggggcggcuguggggacaacguggaguacggcuaccgcuuugccaaggaguuuguggaugcccgggagcgagagaagaacuuugccaagggaucagaggagcagggccgggugcucaugaaccugcaaaacaacgaggccggucgcagggcuguguauaagauggcagacguagccugcaaaugucacggagucucucggucaugcaggcucaagaccugcuggcugcagcuggccgaguuccgcaaggucggggaccggcugaaggagaaguacgacagcgcggccgccaugcgcgucacccgcaagggccggcuggagcuggucaacagccgcuucacccagcccaccccggaggaccuggucuauguggaccccagccccgacuacugccugcgcaacgagagcacgggcucccugggcacgcagggccgccucugcaacaagaccucggagggcauggauggcugugagcucaugugcugcgggcguggcuacaaccaguucaagagcgugcagguggagcgcugccacugcaaguuccacuggugcugcuucgucagguguaagaagugcacggagaucguggaccaguacaucuguaaauaaccggaggcugcuucccgggccccccuugcacucugccucacaaaggucuauauuauauaaaucuauauuaaaucuauuuuaauauuuguuauaaguaaaugggugggugcuauacaauggaaagauggaaauggaaagggaagagcuuauuuaagagacgcuggagaucucugaggaguggacuuugcugguucucuccucuuggugggugggagacagggcuuuuucucucccucuggugaggacucucaggauguagggacuuggaaauauuuacugucuguccaccacggccuggaggagggagguugugguuggauggaggagaugaucuugucuggaagucuagagucuuuguugguuagaggacugccugugauccuggccacuagccaagaggcccuaugaagguggcgggaacucagcuucaaccucgaugucuucagggucuuguccagaauguagauggguuccguaagaggccuggugcucucuuacucuuucauccacgugcacuugugcggcaucugcaguuuacaggaacggcuccuucccuaaaaugagaaguccaaggucaucucuggcccagugaccacagagagaucugcaccucccggacuucaggccugccuuuccagcgagaauucuucauccuccacgguucacuagcuccuaccugaagaggaaagggggccauuugaccugacaugucaggaaagcccuaaacugaauguuugcgccugggcugcagaagccagggugcaugaccaggcugcguggacguuauacugucuucccccacccccggggaggggaagcuugagcugcugcugucacuccuccaccgagggaggccucacaaaccacaggacgcugcaacgggucaggcuggcgggcccggcgugcucaucaucucugccccagguguacgguuucucucugacauuuaaaugcccuucaugggg

SEQ ID NO: 20 - RNA, 2252 nt, homo sapien
gaccauuagcaggcacccaggccugucuuuggcucggaaacgguggcccccaauguagccuaguuugaaccuaggaacugcaggaccagagagauuccacuggagccugauggacgggugacagagggaacccuacucuggaaacugucagucccagggcacuggggagggcugaggccgacuaugcccagccugcugcugcuguucacggcugcucugcuguccagcugggcucagcuucugacagacgccaacuccugguggucauuagcuuugaacccggugcagagacccgagauguuuaucaucggugcccagcccgugugcagucagcuucccgggcucuccccuggccagaggaagcugugccaauuguaccaggagcacauggccuacauaggggagggagccaagacuggcaucaaggaaugccagcaccaguuccggcagcggcgguggaauugcagcacagcggacaacgcaucugucuuugggagagucaugcagauaggcagccgagagaccgccuucacccacgcggugagcgccgcgggcguggucaacgccaucagccgggccugccgcgagggcgagcucuccaccugcggcugcagccggacggcgcggcccaaggaccugccccgggacuggcuguggggcggcuguggggacaacguggaguacggcuaccgcuucgccaaggaguuuguggaugcccgggagcgagagaagaacuuugccaaaggaucagaggagcagggccgggugcucaugaaccugcaaaacaacgaggccggucgcagggcuguguauaagauggcagacguagccugcaaaugccacggcgucucgggguccugcagccucaagaccugcuggcugcagcuggccgaguuccgcaaggucggggaccggcugaaggagaaguacgacagcgcggccgccaugcgcgucacccgcaagggccggcuggagcuggucaacagccgcuucacccagcccaccccggaggaccuggucuauguggaccccagccccgacuacugccugcgcaacgagagcacgggcucccugggcacgcagggccgccucugcaacaagaccucggagggcauggauggcugugagcucaugugcugcgggcguggcuacaaccaguucaagagcgugcagguggagcgcugccacugcaaguuccacuggugcugcuucgucagguguaagaagugcacggagaucguggaccaguacaucuguaaauagcccggagggccugcucccggcccccccugcacucugccucacaaaggucuauauuauauaaaucuauauaaaucuauuuuauauuuguauaaguaaaugggugggugcuauacaauggaaagaugaaaauggaaaggaagagcuuauuuaagagacgcuggagaucucugaggaguggacuuugcugguucucuccucuuggugggugggagacagggcuuuuucucucccucuggcgaggacucucaggauguagggacuuggaaauauuuacugucuguccaccacggccuggaggagggagguugugguuggauggaggagaugaucuugucuggaagucuagagucuuuguugguuagaggacugccugugauccuggccacuaggccaagaggcccuaugaagguggcgggaacucagcuucaaccucgaugucuucagggucuuguccagaauguagauggguuccguaagaggccuggugcucucuuacucuuucauccacgugcacuugugcggcaucugcaguuuacaggaacggcuccuucccuaaaaugagaaguccaaggucaucucuggcccagugaccacagagagaucugcaccucccggacuucaggccugccuuuccagcgagaauucuucauccuccacgguucacuagcuccuaccugaagaggaaagggggccauuugaccugacaugucaggaaagcccuaaacugaauguuugcgccugggcugcagaagccagggugcaugaccaggcugcguggacguuauacugucuucccccacccccggggaggggaagcuugagcugcugcugucacuccuccaccgagggaggccucacaaaccacaggacgcugcaacgggucaggcuggcgggcccggcgugcucaucaucucugccccagguguacgguuucucucugacauuaaaugcccuucauggaaaaaaaaaaaagaaaaaaaaaaaaaaaa

SEQ ID NO: 21 - RNA, 1304 nt, homo sapien
caauucaccaaaauguuuuaauccuacaaaggagagccugagggucagagaaauaagucucugggcuggaaugagagguaggcacgugggggaguggauaggaugggccccauuucuuuggauguucugcagcaaggacagguaugcuuuacaacagccgaaguggccucccggcugccgaacggaggaacgccgcaagcuccgcucuugaaauuacuuguuuucauuucucuuugugguuucucagcucauuauuucuuuggaaauuagguccugugcaggguucccacaguuugggguaagagacagaaguccuagggugggaagaugagcagugggaggcggaggcuggaaagaggccgagcuucuuuguggggaacacgcagcacguaagcaucagugcaacuuucuccgccucaccccggcuccuggucugcccuuauccgcugaguuuccacacugacucuccauuucuguuuucuccagggaacccuacucuggaaacugucagucccagggcacuggggagggcugaggccgacuaugcccagccugcugcugcuguucacggcugcucugcuguccagcugggcucagcuucugacagacgccaacuccugguggucauuagcuuugaacccggugcagagacccgagauguuuaucaucggugcccagcccgugugcagucagcuucccgggcucuccccuggccagaggaagcugugccaauuguaccaggagcacauggccuacauaggggagggagccaagacuggcaucaaggaaugccagcaccaguuccggcagcggcgguggaauugcagcacagcggacaacgcaucugucuuugggagagucaugcagauaggcagccgagagaccgccuucacccacgcggugagcgccgcgggcguggucaacgccaucagccgggccugccgcgagggcgagcucuccaccugcggcugcagccggacggcgcggcccaaggaccugccccgggacuggcuguggggcggcuguggggacaacguggaguacggcuaccgcuucgccaaggaguuuguggaugcccgggagcgagagaagaacuuugccaaaggaucagaggagcagggccgggugcucaugaaccugcaaaacaacgaggccggucgcagggcuguguauaagauggcagacguagccugcaaaugccacggcgucucgggguccugcagccucaagaccugcuggcugcagcuggccgaguuccgcaaggucggggaccggcugaaggagaaguacgacagcgcggccgc

SEQ ID NO: 22 - RNA, 1437 nt, homo sapien
aaaugcuccagauccucaguguucaagaaccucaggaagcuucgcaguccugccucgugccugcuugaacagcuggaugugggcaggaggcugugggagcgggccaugccagcagaaucccgccuuacucuggggacuuacucuugucacagccccugguguccugagggucauuucagugucauggaacccuacucuggaaacugucagucccagggcacuggggagggcugaggccgaccaugcccagccugcugcugcuguucacggcugcucugcuguccagcugggcucagcuucugacagacgccaacuccugguggucauuagcuuugaacccggugcagagacccgagauguuuaucaucggugcccagcccgugugcagucagcuucccgggcucuccccuggccagaggaagcugugccaauuguaccaggagcacauggccuacauaggggagggagccaagacuggcaucaaggaaugacagcaccaguuccggcagcggcgguggaauugcagcacagcggacaacgcaucugucuuugggagagucaugcagauaggcagccgagagaccgccuucacccacgcggugagcgccgcgggcguggucaacgccaucagccgggccugccgcgagggcgagcucuccaccugcggcugcagccggacggcgcggcccaaggaccugccccgggacuggcuguggggcggcuguggggacaacguggaguacggcuaccgcuucgccaaggaguuuguggaugcccgggagcgagagaagaacuuugccaaaggaucagaggagcagggccgggugcucaugaaccugcaaaacaacgaggccggucgcagggcuguguauaagauggcagacguagccugcaaaugccacggcgucucgggguccugcagccucaagaccugcuggcugcagcuggccgaguuccgcaaggucggggaccggcugaaggagaaguacgacagcgcggccgccaugcgcgucacccgcaagggccggcuggagcuggucaacagccgcuucacccagcccaccccggaggaccuggucuauguggaccccagccccgacuacugccugcgcaacgagagcacgggcucccugggcacgcagggccgccucugcaacaagaccucggagggcauggauggcugugagcucaugugcugcgggcguggcuacaaccaguucaagagcgugcagguggagcgcugccacugcaaguuccacuggugcugcuucgucagguguaagaagugcacggagaucguggaccaguacaucuguaaauagcccggagggccugcucccggccccccugcacucugccucacaaaggucuauauuauauaaaucuauauaaaucuauuuuauauuuguauaaguaaaugggugggugcuauacaau

SEQ ID NO: 23 - RNA, 2184 nt, homo sapien
uauucuuccaaauggaaacugcuaauuuuugaagcagaagguugacagcuucaguaagaucucaagagagcgagaagacuggaaucagggaacccuacucuggaaacugucagucccagggcacuggggagggcugaggccgaccaugcccagccugcugcugcuguucacggcugcucugcuguccagcugggcucagcuucugacagacgccaacuccugguggucauuagcuuugaacccggugcagagacccgagauguuuaucaucggugcccagcccgugugcagucagcuucccgggcucuccccuggccagaggaagcugugccaauuguaccaggagcacauggccuacauaggggagggagccaagacuggcaucaaggaaugacagcaccaguuccggcagcggcgguggaauugcagcacagcggacaacgcaucugucuuugggagagucaugcagauaggcagccgagagaccgccuucacccacgcggugagcgccgcgggcguggucaacgccaucagccgggccugccgcgagggcgagcucuccaccugcggcugcagccggacggcgcggcccaaggaccugccccgggacuggcuguggggcggcuguggggacaacguggaguacggcuaccgcuucgccaaggaguuuguggaugcccgggagcgagagaagaacuuugccaaaggaucagaggagcagggccgggugcucaugaaccugcaaaacaacgaggccggucgcagggcuguguauaagauggcagacguagccugcaaaugccacggcgucucgggguccugcagccucaagaccugcuggcugcagcuggccgaguuccgcaaggucggggaccggcugaaggagaaguacgacagcgcggccgccaugcgcgucacccgcaagggccggcuggagcuggucaacagccgcuucacccagcccaccccggaggaccuggucuauguggaccccagccccgacuacugccugcgcaacgagagcacgggcucccugggcacgcagggccgccucugcaacaagaccucggagggcauggauggcugugagcucaugugcugcgggcguggcuacaaccaguucaagagcgugcagguggagcgcugccacugcaaguuccacuggugcugcuucgucagguguaagaagugcacggagaucguggaccaguacaucuguaaauagcccggagggccugcucccggccccccugcacucugccucacaaaggucuauauuauauaaaucuauauaaaucuauuuuauauuuguauaaguaaaugggugggugcuauacaauggaaagaugaaaauggaaaggaagagcuuauuuaagagacgcuggagaucucugaggaguggacuuugcugguucucuccucuuggugggugggagacagggcuuuuucucucccucuggcgaggacucucaggauguagggacuuggaaauauuuacugucuguccaccacggccuggaggagggagguugugguuggauggaggagaugaucuugucuggaagucuagagucuuuguugguuagaggacugccugugauccuggccacuaggccaagaggcccuaugaagguggcgggaacucagcuucaaccucgaugucuucagggucuuguccagaauguagauggguuccguaagaggccuggugcucucuuacucuuucauccacgugcacuugugcggcaucugcaguuuacaggaacggcuccuucccuaaaaugagaaguccaaggucaucucuggcccagugaccacagagagaucugcaccucccggacuucaggccugccuuuccagcgagaauucuucauccuccacgguucacuagcuccuaccugaagaggaaagggggccauuugaccugacaugucaggaaagcccuaaacugaauguuugcgccugggcugcagaagccagggugcaugaccaggcugcguggacguuauacugucuucccccacccccggggaggggaagcuugagcugcugcugucacuccuccaccgagggaggccucacaaaccacaggacgcugcaacgggucaggcuggcgggcccggcgugcucaucaucucugccccagguguacgguuucucucugacauuaaaugcccuucaugg

SEQ ID NO: 24 - RNA, 2238 nt, homo sapien
agucacagccacagugaccauuagcaggcacccaggccugucuuuggcucggaaacgguggcccccaauguagccuaguuugaaccuaggaacugcaggaccagagagauuccacuggagccugauggacgggugacagagggaacccuacucuggaaacugucagucccagggcacuggggagggcugaggccgaccaugcccagccugcugcugcuguucacggcugcucugcuguccagcugggcucagcuucugacagacgccaacuccugguggucauuagcuuugaacccggugcagagacccgagauguuuaucaucggugcccagcccgugugcagucagcuucccgggcucuccccuggccagaggaagcugugccaauuguaccaggagcacauggccuacauaggggagggagccaagacuggcaucaaggaaugacagcaccaguuccggcagcggcgguggaauugcagcacagcggacaacgcaucugucuuugggagagucaugcagauaggcagccgagagaccgccuucacccacgcggugagcgccgcgggcguggucaacgccaucagccgggccugccgcgagggcgagcucuccaccugcggcugcagccggacggcgcggcccaaggaccugccccgggacuggcuguggggcggcuguggggacaacguggaguacggcuaccgcuucgccaaggaguuuguggaugcccgggagcgagagaagaacuuugccaaaggaucagaggagcagggccgggugcucaugaaccugcaaaacaacgaggccggucgcagggcuguguauaagauggcagacguagccugcaaaugccacggcgucucgggguccugcagccucaagaccugcuggcugcagcuggccgaguuccgcaaggucggggaccggcugaaggagaaguacgacagcgcggccgccaugcgcgucacccgcaagggccggcuggagcuggucaacagccgcuucacccagcccaccccggaggaccuggucuauguggaccccagccccgacuacugccugcgcaacgagagcacgggcucccugggcacgcagggccgccucugcaacaagaccucggagggcauggauggcugugagcucaugugcugcgggcguggcuacaaccaguucaagagcgugcagguggagcgcugccacugcaaguuccacuggugcugcuucgucagguguaagaagugcacggagaucguggaccaguacaucuguaaauagcccggagggccugcucccggccccccugcacucugccucacaaaggucuauauuauauaaaucuauauaaaucuauuuuauauuuguauaaguaaaugggugggugcuauacaauggaaagaugaaaauggaaaggaagagcuuauuuaagagacgcuggagaucucugaggaguggacuuugcugguucucuccucuuggugggugggagacagggcuuuuucucucccucuggcgaggacucucaggauguagggacuuggaaauauuuacugucuguccaccacggccuggaggagggagguugugguuggauggaggagaugaucuugucuggaagucuagagucuuuguugguuagaggacugccugugauccuggccacuaggccaagaggcccuaugaagguggcgggaacucagcuucaaccucgaugucuucagggucuuguccagaauguagauggguuccguaagaggccuggugcucucuuacucuuucauccacgugcacuugugcggcaucugcaguuuacaggaacggcuccuucccuaaaaugagaaguccaaggucaucucuggcccagugaccacagagagaucugcaccucccggacuucaggccugccuuuccagcgagaauucuucauccuccacgguucacuagcuccuaccugaagaggaaagggggccauuugaccugacaugucaggaaagcccuaaacugaauguuugcgccugggcugcagaagccagggugcaugaccaggcugcguggacguuauacugucuucccccacccccggggaggggaagcuugagcugcugcugucacuccuccaccgagggaggccucacaaaccacaggacgcugcaacgggucaggcuggcgggcccggcgugcucaucaucucugccccagguguacgguuucucucugacauuaaaugcccuucaugga

SEQ ID NO: 25 - RNA, 508 nt, homo sapien
acugucagucccagggcacuggggagggcugaggccgaccaugcccagccugcugcugcuguucacggcugcucugcuguccagcugggcucagcuucugacagacgccaacuccugguggucauuagcuuugaacccggugcagagacccgagauguuuaucaucggugcccagcccgugugcagucagcuucccgggcucuccccuggccagaggaagcugugccaauuguaccaggagcacauggccuacauaggggagggagccaagacuggcaucaaggaaugacagcaccaguuccggcagcggcgguggaauugcagcacagcggacaacgcaucugucuuugggagagucaugcagauaggcuguguauaagauggcagacguagccugcaaaugccacggcgucucgggguccugcagccucaagaccugcuggcugcagcuggccgaguuccgcaaggucggggaccggcugaaggagaaguacgacagcgcggccgc

SEQ ID NO: 26 - RNA, 2190 nt, homo sapien
uauucuuccaaauggaaacugcuaauuuuugaagcagaagguugacagcuucaguaagaucucaagagagcgagaagacuggaaucagggaacccuacucuggaaacugucagucccagggcacuggggagggcugaggccgaccaugcccagccugcugcugcuguucacggcugcucugcuguccagcugggcucagcuucugacagacgccaacuccugguggucuuuagcuuugaacccggugcagagacccgagauguuuaucaucggugcccagcccgugugcagucagcuucccgggcucuccccuggccagaggaagcugugccaauuguaccaggagcacauggccuacauaagggagggagccaagacuggcaucaaggaaugacagcaccaguuuccgcagcggcgguggaagugcagcacagcggacaacgcaucugucuuugggagagucaugcagauaggcagccgagagaccgccuucacccacgcggugagcgccgcgggcguggucaacgccaucagccgggccugccgcgagggagagcucuccaccugcggcugcagccggacggcgcggcccaaggaccugccccgggacuggcuguggggcggcuguggggacaacguggaguacggcuaccgcuuugccaaggaguuuguggaugcccgggagcgagagaagaacuuugccaagggaucagaggagcagggccgggugcucaugaaccugcaaaacaacgaggccggucgcagggcuguguauaagauggcagacguagccugcaaaugucacggagucucucggucaugcaggcucaagaccugcuggcugcagcuggccgaguuccgcaaggucggggaccggcugaaggagaaguacgacagcgcggccgccaugcgcgucacccgcaagggccggcuggagcuggucaacagccgcuucacccagcccaccccggaggaccuggucuauguggaccccagccccgacuacugccugcgcaacgagagcacgggcucccugggcacgcagggccgccucugcaacaagaccucggagggcauggauggcugugagcucaugugcugcgggcguggcuacaaccaguucaagagcgugcagguggagcgcugccacugcaaguuccacuggugcugcuucgucagguguaagaagugcacggagaucguggaccaguacaucuguaaauaaccggaggcugcuucccgggccccccuugcacucugccucacaaaggucuauauuauauaaaucuauauuaaaucuauuuuaauauuuguuauaaguaaaugggugggugcuauacaauggaaagauggaaauggaaagggaagagcuuauuuaagagacgcuggagaucucugaggaguggacuuugcugguucucuccucuuggugggugggagacagggcuuuuucucucccucuggugaggacucucaggauguagggacuuggaaauauuuacugucuguccaccacggccuggaggagggagguugugguuggauggaggagaugaucuugucuggaagucuagagucuuuguugguuagaggacugccugugauccuggccacuagccaagaggcccuaugaagguggcgggaacucagcuucaaccucgaugucuucagggucuuguccagaauguagauggguuccguaagaggccuggugcucucuuacucuuucauccacgugcacuugugcggcaucugcaguuuacaggaacggcuccuucccuaaaaugagaaguccaaggucaucucuggcccagugaccacagagagaucugcaccucccggacuucaggccugccuuuccagcgagaauucuucauccuccacgguucacuagcuccuaccugaagaggaaagggggccauuugaccugacaugucaggaaagcccuaaacugaauguuugcgccugggcugcagaagccagggugcaugaccaggcugcguggacguuauacugucuucccccacccccggggaggggaagcuugagcugcugcugucacuccuccaccgagggaggccucacaaaccacaggacgcugcaacgggucaggcuggcgggcccggcgugcucaucaucucugccccagguguacgguuucucucugacauuuaaaugcccuucaugggg

SEQ ID NO: 27 - RNA, 2252 nt, homo sapien
gaccauuagcaggcacccaggccugucuuuggcucggaaacgguggcccccaauguagccuaguuugaaccuaggaacugcaggaccagagagauuccacuggagccugauggacgggugacagagggaacccuacucuggaaacugucagucccagggcacuggggagggcugaggccgaccaugcccagccugcugcugcuguucacggcugcucugcuguccagcugggcucagcuucugacagacgccaacuccugguggucauuagcuuugaacccggugcagagacccgagauguuuaucaucggugcccagcccgugugcagucagcuucccgggcucuccccuggccagaggaagcugugccaauuguaccaggagcacauggccuacauaggggagggagccaagacuggcaucaaggaaugacagcaccaguuccggcagcggcgguggaauugcagcacagcggacaacgcaucugucuuugggagagucaugcagauaggcagccgagagaccgccuucacccacgcggugagcgccgcgggcguggucaacgccaucagccgggccugccgcgagggcgagcucuccaccugcggcugcagccggacggcgcggcccaaggaccugccccgggacuggcuguggggcggcuguggggacaacguggaguacggcuaccgcuucgccaaggaguuuguggaugcccgggagcgagagaagaacuuugccaaaggaucagaggagcagggccgggugcucaugaaccugcaaaacaacgaggccggucgcagggcuguguauaagauggcagacguagccugcaaaugccacggcgucucgggguccugcagccucaagaccugcuggcugcagcuggccgaguuccgcaaggucggggaccggcugaaggagaaguacgacagcgcggccgccaugcgcgucacccgcaagggccggcuggagcuggucaacagccgcuucacccagcccaccccggaggaccuggucuauguggaccccagccccgacuacugccugcgcaacgagagcacgggcucccugggcacgcagggccgccucugcaacaagaccucggagggcauggauggcugugagcucaugugcugcgggcguggcuacaaccaguucaagagcgugcagguggagcgcugccacugcaaguuccacuggugcugcuucgucagguguaagaagugcacggagaucguggaccaguacaucuguaaauagcccggagggccugcucccggcccccccugcacucugccucacaaaggucuauauuauauaaaucuauauaaaucuauuuuauauuuguauaaguaaaugggugggugcuauacaauggaaagaugaaaauggaaaggaagagcuuauuuaagagacgcuggagaucucugaggaguggacuuugcugguucucuccucuuggugggugggagacagggcuuuuucucucccucuggcgaggacucucaggauguagggacuuggaaauauuuacugucuguccaccacggccuggaggagggagguugugguuggauggaggagaugaucuugucuggaagucuagagucuuuguugguuagaggacugccugugauccuggccacuaggccaagaggcccuaugaagguggcgggaacucagcuucaaccucgaugucuucagggucuuguccagaauguagauggguuccguaagaggccuggugcucucuuacucuuucauccacgugcacuugugcggcaucugcaguuuacaggaacggcuccuucccuaaaaugagaaguccaaggucaucucuggcccagugaccacagagagaucugcaccucccggacuucaggccugccuuuccagcgagaauucuucauccuccacgguucacuagcuccuaccugaagaggaaagggggccauuugaccugacaugucaggaaagcccuaaacugaauguuugcgccugggcugcagaagccagggugcaugaccaggcugcguggacguuauacugucuucccccacccccggggaggggaagcuugagcugcugcugucacuccuccaccgagggaggccucacaaaccacaggacgcugcaacgggucaggcuggcgggcccggcgugcucaucaucucugccccagguguacgguuucucucugacauuaaaugcccuucauggaaaaaaaaaaaagaaaaaaaaaaaaaaaa

SEQ ID NO: 28 - RNA, 1304 nt, homo sapien
caauucaccaaaauguuuuaauccuacaaaggagagccugagggucagagaaauaagucucugggcuggaaugagagguaggcacgugggggaguggauaggaugggccccauuucuuuggauguucugcagcaaggacagguaugcuuuacaacagccgaaguggccucccggcugccgaacggaggaacgccgcaagcuccgcucuugaaauuacuuguuuucauuucucuuugugguuucucagcucauuauuucuuuggaaauuagguccugugcaggguucccacaguuugggguaagagacagaaguccuagggugggaagaugagcagugggaggcggaggcuggaaagaggccgagcuucuuuguggggaacacgcagcacguaagcaucagugcaacuuucuccgccucaccccggcuccuggucugcccuuauccgcugaguuuccacacugacucuccauuucuguuuucuccagggaacccuacucuggaaacugucagucccagggcacuggggagggcugaggccgaccaugcccagccugcugcugcuguucacggcugcucugcuguccagcugggcucagcuucugacagacgccaacuccugguggucauuagcuuugaacccggugcagagacccgagauguuuaucaucggugcccagcccgugugcagucagcuucccgggcucuccccuggccagaggaagcugugccaauuguaccaggagcacauggccuacauaggggagggagccaagacuggcaucaaggaaugacagcaccaguuccggcagcggcgguggaauugcagcacagcggacaacgcaucugucuuugggagagucaugcagauaggcagccgagagaccgccuucacccacgcggugagcgccgcgggcguggucaacgccaucagccgggccugccgcgagggcgagcucuccaccugcggcugcagccggacggcgcggcccaaggaccugccccgggacuggcuguggggcggcuguggggacaacguggaguacggcuaccgcuucgccaaggaguuuguggaugcccgggagcgagagaagaacuuugccaaaggaucagaggagcagggccgggugcucaugaaccugcaaaacaacgaggccggucgcagggcuguguauaagauggcagacguagccugcaaaugccacggcgucucgggguccugcagccucaagaccugcuggcugcagcuggccgaguuccgcaaggucggggaccggcugaaggagaaguacgacagcgcggccgc

SEQ ID NO: 29 - RNA, 1559 nt, homo sapien
cgaccaugcccagccugcugcugcuguucacggcugcucugcuguccagcugggcucagcuucugacagacgccaacuccugguggucauuagcuuugaacccggugcagagacccgagauguuuaucaucggugcccagcccgugugcagucagcuucccgggcucuccccuggccagaggaagcugugccaauuguaccaggagcacauggccuacauaggggagggagccaagacuggcaucaaggaaugaagcaccaguuccggcagcggcgguggaauugcagcacagcggacaacgcaucugucuuugggagagucaugcagauaggcagccgagagaccgccuucacccacgcggugagcgccgcgggcguggucaacgccaucagccgggccugccgcgagggcgagcucuccaccugcggcugcagccggacggcgcggcccaaggaccugccccgggacuggcuguggggcggcuguggggacaacguggaguacggcuaccgcuucgccaaggaguuuguggaugcccgggagcgagagaagaacuuugccaaaggaucagaggagcagggccgggugcucaugaaccugcaaaacaacgaggccggucgcagggcuguguauaagauggcagacguagccugcaaaugccacggcgucucgggguccugcagccucaagaccugcuggcugcagcuggccgaguuccgcaaggucggggaccggcugaaggagaaguacgacagcgcggccgccaugcgcgucacccgcaagggccggcuggagcuggucaacagccgcuucacccagcccaccccggaggaccuggucuauguggaccccagccccgacuacugccugcgcaacgagagcacgggcucccugggcacgcagggccgccucugcaacaagaccucggagggcauggauggcugugagcucaugugcugcgggcguggcuacaaccaguucaagagcgugcagguggagcgcugccacugcaaguuccacuggugcugcuucgucagguguaagaagugcacggagaucguggaccaguacaucuguaaauagcccggagggccugcucccggccccccugcacucugccucacaaaggucuauauuauauaaaucuauauaaaucuauuuuauauuuguauaaguaaaugggugggugcuauacaauggaaagaugaaaauggaaaggaagagcuuauuuaagagacgcuggagaucucugaggaguggacuuugcugguucucuccucuuggugggugggagacagggcuuuuucucucccucuggugaggacucucaggauguagggacuuggaaauauuuacugucuguccaccacggccuggaggagggagguugugguuggauggaggagaugaucuugucuggaagucuagagucuuuguugguuagaggacugccugugauccuggccacuaggccaagaggcccuaugaagguggcgggaacucagcuucaaccucgaugucuucagggucuuguccagaauguagauggguuccguaa

SEQ ID NO: 30 - RNA, 1437 nt, homo sapien
aaaugcuccagauccucaguguucaagaaccucaggaagcuucgcaguccugccucgugccugcuugaacagcuggaugugggcaggaggcugugggagcgggccaugccagcagaaucccgccuuacucuggggacuuacucuugucacagccccugguguccugagggucauuucagugucauggaacccuacucuggaaacugucagucccagggcacuggggagggcugaggccgaccaugcccagccugcugcugcuguucacggcugcucugcuguccagcugggcucagcuucugacagacgccaacuccugguggucauuagcuuugaacccggugcagagacccgagauguuuaucaucggugcccagcccgugugcagucagcuucccgggcucuccccuggccagaggaagcugugccaauuguaccaggagcacauggccuacauaggggagggagccaagacuggcaucaaggaaugccagcaccaguuccggcagcggcgguggaauugcagcacagcggacaacgcaucugucuuugggagagucaugcagauaggcagccgagagaccgccuucacccacgcggugagcgccgcgggcguggucaacgccaucagccgggccugcugcgagggcgagcucuccaccugcggcugcagccggacggcgcggcccaaggaccugccccgggacuggcuguggggcggcuguggggacaacguggaguacggcuaccgcuucgccaaggaguuuguggaugcccgggagcgagagaagaacuuugccaaaggaucagaggagcagggccgggugcucaugaaccugcaaaacaacgaggccggucgcagggcuguguauaagauggcagacguagccugcaaaugccacggcgucucgggguccugcagccucaagaccugcuggcugcagcuggccgaguuccgcaaggucggggaccggcugaaggagaaguacgacagcgcggccgccaugcgcgucacccgcaagggccggcuggagcuggucaacagccgcuucacccagcccaccccggaggaccuggucuauguggaccccagccccgacuacugccugcgcaacgagagcacgggcucccugggcacgcagggccgccucugcaacaagaccucggagggcauggauggcugugagcucaugugcugcgggcguggcuacaaccaguucaagagcgugcagguggagcgcugccacugcaaguuccacuggugcugcuucgucagguguaagaagugcacggagaucguggaccaguacaucuguaaauagcccggagggccugcucccggccccccugcacucugccucacaaaggucuauauuauauaaaucuauauaaaucuauuuuauauuuguauaaguaaaugggugggugcuauacaau

SEQ ID NO: 31 - RNA, 2184 nt, homo sapien
uauucuuccaaauggaaacugcuaauuuuugaagcagaagguugacagcuucaguaagaucucaagagagcgagaagacuggaaucagggaacccuacucuggaaacugucagucccagggcacuggggagggcugaggccgaccaugcccagccugcugcugcuguucacggcugcucugcuguccagcugggcucagcuucugacagacgccaacuccugguggucauuagcuuugaacccggugcagagacccgagauguuuaucaucggugcccagcccgugugcagucagcuucccgggcucuccccuggccagaggaagcugugccaauuguaccaggagcacauggccuacauaggggagggagccaagacuggcaucaaggaaugccagcaccaguuccggcagcggcgguggaauugcagcacagcggacaacgcaucugucuuugggagagucaugcagauaggcagccgagagaccgccuucacccacgcggugagcgccgcgggcguggucaacgccaucagccgggccugcugcgagggcgagcucuccaccugcggcugcagccggacggcgcggcccaaggaccugccccgggacuggcuguggggcggcuguggggacaacguggaguacggcuaccgcuucgccaaggaguuuguggaugcccgggagcgagagaagaacuuugccaaaggaucagaggagcagggccgggugcucaugaaccugcaaaacaacgaggccggucgcagggcuguguauaagauggcagacguagccugcaaaugccacggcgucucgggguccugcagccucaagaccugcuggcugcagcuggccgaguuccgcaaggucggggaccggcugaaggagaaguacgacagcgcggccgccaugcgcgucacccgcaagggccggcuggagcuggucaacagccgcuucacccagcccaccccggaggaccuggucuauguggaccccagccccgacuacugccugcgcaacgagagcacgggcucccugggcacgcagggccgccucugcaacaagaccucggagggcauggauggcugugagcucaugugcugcgggcguggcuacaaccaguucaagagcgugcagguggagcgcugccacugcaaguuccacuggugcugcuucgucagguguaagaagugcacggagaucguggaccaguacaucuguaaauagcccggagggccugcucccggccccccugcacucugccucacaaaggucuauauuauauaaaucuauauaaaucuauuuuauauuuguauaaguaaaugggugggugcuauacaauggaaagaugaaaauggaaaggaagagcuuauuuaagagacgcuggagaucucugaggaguggacuuugcugguucucuccucuuggugggugggagacagggcuuuuucucucccucuggcgaggacucucaggauguagggacuuggaaauauuuacugucuguccaccacggccuggaggagggagguugugguuggauggaggagaugaucuugucuggaagucuagagucuuuguugguuagaggacugccugugauccuggccacuaggccaagaggcccuaugaagguggcgggaacucagcuucaaccucgaugucuucagggucuuguccagaauguagauggguuccguaagaggccuggugcucucuuacucuuucauccacgugcacuugugcggcaucugcaguuuacaggaacggcuccuucccuaaaaugagaaguccaaggucaucucuggcccagugaccacagagagaucugcaccucccggacuucaggccugccuuuccagcgagaauucuucauccuccacgguucacuagcuccuaccugaagaggaaagggggccauuugaccugacaugucaggaaagcccuaaacugaauguuugcgccugggcugcagaagccagggugcaugaccaggcugcguggacguuauacugucuucccccacccccggggaggggaagcuugagcugcugcugucacuccuccaccgagggaggccucacaaaccacaggacgcugcaacgggucaggcuggcgggcccggcgugcucaucaucucugccccagguguacgguuucucucugacauuaaaugcccuucaugg

SEQ ID NO: 32 - RNA, 2238 nt, homo sapien
agucacagccacagugaccauuagcaggcacccaggccugucuuuggcucggaaacgguggcccccaauguagccuaguuugaaccuaggaacugcaggaccagagagauuccacuggagccugauggacgggugacagagggaacccuacucuggaaacugucagucccagggcacuggggagggcugaggccgaccaugcccagccugcugcugcuguucacggcugcucugcuguccagcugggcucagcuucugacagacgccaacuccugguggucauuagcuuugaacccggugcagagacccgagauguuuaucaucggugcccagcccgugugcagucagcuucccgggcucuccccuggccagaggaagcugugccaauuguaccaggagcacauggccuacauaggggagggagccaagacuggcaucaaggaaugccagcaccaguuccggcagcggcgguggaauugcagcacagcggacaacgcaucugucuuugggagagucaugcagauaggcagccgagagaccgccuucacccacgcggugagcgccgcgggcguggucaacgccaucagccgggccugcugcgagggcgagcucuccaccugcggcugcagccggacggcgcggcccaaggaccugccccgggacuggcuguggggcggcuguggggacaacguggaguacggcuaccgcuucgccaaggaguuuguggaugcccgggagcgagagaagaacuuugccaaaggaucagaggagcagggccgggugcucaugaaccugcaaaacaacgaggccggucgcagggcuguguauaagauggcagacguagccugcaaaugccacggcgucucgggguccugcagccucaagaccugcuggcugcagcuggccgaguuccgcaaggucggggaccggcugaaggagaaguacgacagcgcggccgccaugcgcgucacccgcaagggccggcuggagcuggucaacagccgcuucacccagcccaccccggaggaccuggucuauguggaccccagccccgacuacugccugcgcaacgagagcacgggcucccugggcacgcagggccgccucugcaacaagaccucggagggcauggauggcugugagcucaugugcugcgggcguggcuacaaccaguucaagagcgugcagguggagcgcugccacugcaaguuccacuggugcugcuucgucagguguaagaagugcacggagaucguggaccaguacaucuguaaauagcccggagggccugcucccggccccccugcacucugccucacaaaggucuauauuauauaaaucuauauaaaucuauuuuauauuuguauaaguaaaugggugggugcuauacaauggaaagaugaaaauggaaaggaagagcuuauuuaagagacgcuggagaucucugaggaguggacuuugcugguucucuccucuuggugggugggagacagggcuuuuucucucccucuggcgaggacucucaggauguagggacuuggaaauauuuacugucuguccaccacggccuggaggagggagguugugguuggauggaggagaugaucuugucuggaagucuagagucuuuguugguuagaggacugccugugauccuggccacuaggccaagaggcccuaugaagguggcgggaacucagcuucaaccucgaugucuucagggucuuguccagaauguagauggguuccguaagaggccuggugcucucuuacucuuucauccacgugcacuugugcggcaucugcaguuuacaggaacggcuccuucccuaaaaugagaaguccaaggucaucucuggcccagugaccacagagagaucugcaccucccggacuucaggccugccuuuccagcgagaauucuucauccuccacgguucacuagcuccuaccugaagaggaaagggggccauuugaccugacaugucaggaaagcccuaaacugaauguuugcgccugggcugcagaagccagggugcaugaccaggcugcguggacguuauacugucuucccccacccccggggaggggaagcuugagcugcugcugucacuccuccaccgagggaggccucacaaaccacaggacgcugcaacgggucaggcuggcgggcccggcgugcucaucaucucugccccagguguacgguuucucucugacauuaaaugcccuucaugga

SEQ ID NO: 33 - RNA, 2190 nt, homo sapien
uauucuuccaaauggaaacugcuaauuuuugaagcagaagguugacagcuucaguaagaucucaagagagcgagaagacuggaaucagggaacccuacucuggaaacugucagucccagggcacuggggagggcugaggccgaccaugcccagccugcugcugcuguucacggcugcucugcuguccagcugggcucagcuucugacagacgccaacuccugguggucuuuagcuuugaacccggugcagagacccgagauguuuaucaucggugcccagcccgugugcagucagcuucccgggcucuccccuggccagaggaagcugugccaauuguaccaggagcacauggccuacauaagggagggagccaagacuggcaucaaggaaugccagcaccaguuuccgcagcggcgguggaagugcagcacagcggacaacgcaucugucuuugggagagucaugcagauaggcagccgagagaccgccuucacccacgcggugagcgccgcgggcguggucaacgccaucagccgggccugcugcgagggagagcucuccaccugcggcugcagccggacggcgcggcccaaggaccugccccgggacuggcuguggggcggcuguggggacaacguggaguacggcuaccgcuuugccaaggaguuuguggaugcccgggagcgagagaagaacuuugccaagggaucagaggagcagggccgggugcucaugaaccugcaaaacaacgaggccggucgcagggcuguguauaagauggcagacguagccugcaaaugucacggagucucucggucaugcaggcucaagaccugcuggcugcagcuggccgaguuccgcaaggucggggaccggcugaaggagaaguacgacagcgcggccgccaugcgcgucacccgcaagggccggcuggagcuggucaacagccgcuucacccagcccaccccggaggaccuggucuauguggaccccagccccgacuacugccugcgcaacgagagcacgggcucccugggcacgcagggccgccucugcaacaagaccucggagggcauggauggcugugagcucaugugcugcgggcguggcuacaaccaguucaagagcgugcagguggagcgcugccacugcaaguuccacuggugcugcuucgucagguguaagaagugcacggagaucguggaccaguacaucuguaaauaaccggaggcugcuucccgggccccccuugcacucugccucacaaaggucuauauuauauaaaucuauauuaaaucuauuuuaauauuuguuauaaguaaaugggugggugcuauacaauggaaagauggaaauggaaagggaagagcuuauuuaagagacgcuggagaucucugaggaguggacuuugcugguucucuccucuuggugggugggagacagggcuuuuucucucccucuggugaggacucucaggauguagggacuuggaaauauuuacugucuguccaccacggccuggaggagggagguugugguuggauggaggagaugaucuugucuggaagucuagagucuuuguugguuagaggacugccugugauccuggccacuagccaagaggcccuaugaagguggcgggaacucagcuucaaccucgaugucuucagggucuuguccagaauguagauggguuccguaagaggccuggugcucucuuacucuuucauccacgugcacuugugcggcaucugcaguuuacaggaacggcuccuucccuaaaaugagaaguccaaggucaucucuggcccagugaccacagagagaucugcaccucccggacuucaggccugccuuuccagcgagaauucuucauccuccacgguucacuagcuccuaccugaagaggaaagggggccauuugaccugacaugucaggaaagcccuaaacugaauguuugcgccugggcugcagaagccagggugcaugaccaggcugcguggacguuauacugucuucccccacccccggggaggggaagcuugagcugcugcugucacuccuccaccgagggaggccucacaaaccacaggacgcugcaacgggucaggcuggcgggcccggcgugcucaucaucucugccccagguguacgguuucucucugacauuuaaaugcccuucaugggg

SEQ ID NO: 34 - RNA, 2252 nt, homo sapien
gaccauuagcaggcacccaggccugucuuuggcucggaaacgguggcccccaauguagccuaguuugaaccuaggaacugcaggaccagagagauuccacuggagccugauggacgggugacagagggaacccuacucuggaaacugucagucccagggcacuggggagggcugaggccgaccaugcccagccugcugcugcuguucacggcugcucugcuguccagcugggcucagcuucugacagacgccaacuccugguggucauuagcuuugaacccggugcagagacccgagauguuuaucaucggugcccagcccgugugcagucagcuucccgggcucuccccuggccagaggaagcugugccaauuguaccaggagcacauggccuacauaggggagggagccaagacuggcaucaaggaaugccagcaccaguuccggcagcggcgguggaauugcagcacagcggacaacgcaucugucuuugggagagucaugcagauaggcagccgagagaccgccuucacccacgcggugagcgccgcgggcguggucaacgccaucagccgggccugcugcgagggcgagcucuccaccugcggcugcagccggacggcgcggcccaaggaccugccccgggacuggcuguggggcggcuguggggacaacguggaguacggcuaccgcuucgccaaggaguuuguggaugcccgggagcgagagaagaacuuugccaaaggaucagaggagcagggccgggugcucaugaaccugcaaaacaacgaggccggucgcagggcuguguauaagauggcagacguagccugcaaaugccacggcgucucgggguccugcagccucaagaccugcuggcugcagcuggccgaguuccgcaaggucggggaccggcugaaggagaaguacgacagcgcggccgccaugcgcgucacccgcaagggccggcuggagcuggucaacagccgcuucacccagcccaccccggaggaccuggucuauguggaccccagccccgacuacugccugcgcaacgagagcacgggcucccugggcacgcagggccgccucugcaacaagaccucggagggcauggauggcugugagcucaugugcugcgggcguggcuacaaccaguucaagagcgugcagguggagcgcugccacugcaaguuccacuggugcugcuucgucagguguaagaagugcacggagaucguggaccaguacaucuguaaauagcccggagggccugcucccggcccccccugcacucugccucacaaaggucuauauuauauaaaucuauauaaaucuauuuuauauuuguauaaguaaaugggugggugcuauacaauggaaagaugaaaauggaaaggaagagcuuauuuaagagacgcuggagaucucugaggaguggacuuugcugguucucuccucuuggugggugggagacagggcuuuuucucucccucuggcgaggacucucaggauguagggacuuggaaauauuuacugucuguccaccacggccuggaggagggagguugugguuggauggaggagaugaucuugucuggaagucuagagucuuuguugguuagaggacugccugugauccuggccacuaggccaagaggcccuaugaagguggcgggaacucagcuucaaccucgaugucuucagggucuuguccagaauguagauggguuccguaagaggccuggugcucucuuacucuuucauccacgugcacuugugcggcaucugcaguuuacaggaacggcuccuucccuaaaaugagaaguccaaggucaucucuggcccagugaccacagagagaucugcaccucccggacuucaggccugccuuuccagcgagaauucuucauccuccacgguucacuagcuccuaccugaagaggaaagggggccauuugaccugacaugucaggaaagcccuaaacugaauguuugcgccugggcugcagaagccagggugcaugaccaggcugcguggacguuauacugucuucccccacccccggggaggggaagcuugagcugcugcugucacuccuccaccgagggaggccucacaaaccacaggacgcugcaacgggucaggcuggcgggcccggcgugcucaucaucucugccccagguguacgguuucucucugacauuaaaugcccuucauggaaaaaaaaaaaagaaaaaaaaaaaaaaaa

SEQ ID NO: 35 - RNA, 1304 nt, homo sapien
caauucaccaaaauguuuuaauccuacaaaggagagccugagggucagagaaauaagucucugggcuggaaugagagguaggcacgugggggaguggauaggaugggccccauuucuuuggauguucugcagcaaggacagguaugcuuuacaacagccgaaguggccucccggcugccgaacggaggaacgccgcaagcuccgcucuugaaauuacuuguuuucauuucucuuugugguuucucagcucauuauuucuuuggaaauuagguccugugcaggguucccacaguuugggguaagagacagaaguccuagggugggaagaugagcagugggaggcggaggcuggaaagaggccgagcuucuuuguggggaacacgcagcacguaagcaucagugcaacuuucuccgccucaccccggcuccuggucugcccuuauccgcugaguuuccacacugacucuccauuucuguuuucuccagggaacccuacucuggaaacugucagucccagggcacuggggagggcugaggccgaccaugcccagccugcugcugcuguucacggcugcucugcuguccagcugggcucagcuucugacagacgccaacuccugguggucauuagcuuugaacccggugcagagacccgagauguuuaucaucggugcccagcccgugugcagucagcuucccgggcucuccccuggccagaggaagcugugccaauuguaccaggagcacauggccuacauaggggagggagccaagacuggcaucaaggaaugccagcaccaguuccggcagcggcgguggaauugcagcacagcggacaacgcaucugucuuugggagagucaugcagauaggcagccgagagaccgccuucacccacgcggugagcgccgcgggcguggucaacgccaucagccgggccugcugcgagggcgagcucuccaccugcggcugcagccggacggcgcggcccaaggaccugccccgggacuggcuguggggcggcuguggggacaacguggaguacggcuaccgcuucgccaaggaguuuguggaugcccgggagcgagagaagaacuuugccaaaggaucagaggagcagggccgggugcucaugaaccugcaaaacaacgaggccggucgcagggcuguguauaagauggcagacguagccugcaaaugccacggcgucucgggguccugcagccucaagaccugcuggcugcagcuggccgaguuccgcaaggucggggaccggcugaaggagaaguacgacagcgcggccgc

SEQ ID NO: 36 - RNA, 1560 nt, homo sapien
cgaccaugcccagccugcugcugcuguucacggcugcucugcuguccagcugggcucagcuucugacagacgccaacuccugguggucauuagcuuugaacccggugcagagacccgagauguuuaucaucggugcccagcccgugugcagucagcuucccgggcucuccccuggccagaggaagcugugccaauuguaccaggagcacauggccuacauaggggagggagccaagacuggcaucaaggaaugccagcaccaguuccggcagcggcgguggaauugcagcacagcggacaacgcaucugucuuugggagagucaugcagauaggcagccgagagaccgccuucacccacgcggugagcgccgcgggcguggucaacgccaucagccgggccugcugcgagggcgagcucuccaccugcggcugcagccggacggcgcggcccaaggaccugccccgggacuggcuguggggcggcuguggggacaacguggaguacggcuaccgcuucgccaaggaguuuguggaugcccgggagcgagagaagaacuuugccaaaggaucagaggagcagggccgggugcucaugaaccugcaaaacaacgaggccggucgcagggcuguguauaagauggcagacguagccugcaaaugccacggcgucucgggguccugcagccucaagaccugcuggcugcagcuggccgaguuccgcaaggucggggaccggcugaaggagaaguacgacagcgcggccgccaugcgcgucacccgcaagggccggcuggagcuggucaacagccgcuucacccagcccaccccggaggaccuggucuauguggaccccagccccgacuacugccugcgcaacgagagcacgggcucccugggcacgcagggccgccucugcaacaagaccucggagggcauggauggcugugagcucaugugcugcgggcguggcuacaaccaguucaagagcgugcagguggagcgcugccacugcaaguuccacuggugcugcuucgucagguguaagaagugcacggagaucguggaccaguacaucuguaaauagcccggagggccugcucccggccccccugcacucugccucacaaaggucuauauuauauaaaucuauauaaaucuauuuuauauuuguauaaguaaaugggugggugcuauacaauggaaagaugaaaauggaaaggaagagcuuauuuaagagacgcuggagaucucugaggaguggacuuugcugguucucuccucuuggugggugggagacagggcuuuuucucucccucuggugaggacucucaggauguagggacuuggaaauauuuacugucuguccaccacggccuggaggagggagguugugguuggauggaggagaugaucuugucuggaagucuagagucuuuguugguuagaggacugccugugauccuggccacuaggccaagaggcccuaugaagguggcgggaacucagcuucaaccucgaugucuucagggucuuguccagaauguagauggguuccguaa

SEQ ID NO: 37 - RNA, 1437 nt, homo sapien
aaaugcuccagauccucaguguucaagaaccucaggaagcuucgcaguccugccucgugccugcuugaacagcuggaugugggcaggaggcugugggagcgggccaugccagcagaaucccgccuuacucuggggacuuacucuugucacagccccugguguccugagggucauuucagugucauggaacccuacucuggaaacugucagucccagggcacuggggagggcugaggccgaccaugcccagccugcugcugcuguucacggcugcucugcuguccagcugggcucagcuucugacagacgccaacuccugguggucauuagcuuugaacccggugcagagacccgagauguuuaucaucggugcccagcccgugugcagucagcuucccgggcucuccccuggccagaggaagcugugccaauuguaccaggagcacauggccuacauaggggagggagccaagacuggcaucaaggaaugccagcaccaguuccggcagcggcgguggaauugcagcacagcggacaacgcaucugucuuugggagagucaugcagauaggcagccgagagaccgccuucacccacgcggugagcgccgcgggcguggucaacgccaucagccgggccugcagcgagggcgagcucuccaccugcggcugcagccggacggcgcggcccaaggaccugccccgggacuggcuguggggcggcuguggggacaacguggaguacggcuaccgcuucgccaaggaguuuguggaugcccgggagcgagagaagaacuuugccaaaggaucagaggagcagggccgggugcucaugaaccugcaaaacaacgaggccggucgcagggcuguguauaagauggcagacguagccugcaaaugccacggcgucucgggguccugcagccucaagaccugcuggcugcagcuggccgaguuccgcaaggucggggaccggcugaaggagaaguacgacagcgcggccgccaugcgcgucacccgcaagggccggcuggagcuggucaacagccgcuucacccagcccaccccggaggaccuggucuauguggaccccagccccgacuacugccugcgcaacgagagcacgggcucccugggcacgcagggccgccucugcaacaagaccucggagggcauggauggcugugagcucaugugcugcgggcguggcuacaaccaguucaagagcgugcagguggagcgcugccacugcaaguuccacuggugcugcuucgucagguguaagaagugcacggagaucguggaccaguacaucuguaaauagcccggagggccugcucccggccccccugcacucugccucacaaaggucuauauuauauaaaucuauauaaaucuauuuuauauuuguauaaguaaaugggugggugcuauacaau

SEQ ID NO: 38 - RNA, 2184 nt, homo sapien
uauucuuccaaauggaaacugcuaauuuuugaagcagaagguugacagcuucaguaagaucucaagagagcgagaagacuggaaucagggaacccuacucuggaaacugucagucccagggcacuggggagggcugaggccgaccaugcccagccugcugcugcuguucacggcugcucugcuguccagcugggcucagcuucugacagacgccaacuccugguggucauuagcuuugaacccggugcagagacccgagauguuuaucaucggugcccagcccgugugcagucagcuucccgggcucuccccuggccagaggaagcugugccaauuguaccaggagcacauggccuacauaggggagggagccaagacuggcaucaaggaaugccagcaccaguuccggcagcggcgguggaauugcagcacagcggacaacgcaucugucuuugggagagucaugcagauaggcagccgagagaccgccuucacccacgcggugagcgccgcgggcguggucaacgccaucagccgggccugcagcgagggcgagcucuccaccugcggcugcagccggacggcgcggcccaaggaccugccccgggacuggcuguggggcggcuguggggacaacguggaguacggcuaccgcuucgccaaggaguuuguggaugcccgggagcgagagaagaacuuugccaaaggaucagaggagcagggccgggugcucaugaaccugcaaaacaacgaggccggucgcagggcuguguauaagauggcagacguagccugcaaaugccacggcgucucgggguccugcagccucaagaccugcuggcugcagcuggccgaguuccgcaaggucggggaccggcugaaggagaaguacgacagcgcggccgccaugcgcgucacccgcaagggccggcuggagcuggucaacagccgcuucacccagcccaccccggaggaccuggucuauguggaccccagccccgacuacugccugcgcaacgagagcacgggcucccugggcacgcagggccgccucugcaacaagaccucggagggcauggauggcugugagcucaugugcugcgggcguggcuacaaccaguucaagagcgugcagguggagcgcugccacugcaaguuccacuggugcugcuucgucagguguaagaagugcacggagaucguggaccaguacaucuguaaauagcccggagggccugcucccggccccccugcacucugccucacaaaggucuauauuauauaaaucuauauaaaucuauuuuauauuuguauaaguaaaugggugggugcuauacaauggaaagaugaaaauggaaaggaagagcuuauuuaagagacgcuggagaucucugaggaguggacuuugcugguucucuccucuuggugggugggagacagggcuuuuucucucccucuggcgaggacucucaggauguagggacuuggaaauauuuacugucuguccaccacggccuggaggagggagguugugguuggauggaggagaugaucuugucuggaagucuagagucuuuguugguuagaggacugccugugauccuggccacuaggccaagaggcccuaugaagguggcgggaacucagcuucaaccucgaugucuucagggucuuguccagaauguagauggguuccguaagaggccuggugcucucuuacucuuucauccacgugcacuugugcggcaucugcaguuuacaggaacggcuccuucccuaaaaugagaaguccaaggucaucucuggcccagugaccacagagagaucugcaccucccggacuucaggccugccuuuccagcgagaauucuucauccuccacgguucacuagcuccuaccugaagaggaaagggggccauuugaccugacaugucaggaaagcccuaaacugaauguuugcgccugggcugcagaagccagggugcaugaccaggcugcguggacguuauacugucuucccccacccccggggaggggaagcuugagcugcugcugucacuccuccaccgagggaggccucacaaaccacaggacgcugcaacgggucaggcuggcgggcccggcgugcucaucaucucugccccagguguacgguuucucucugacauuaaaugcccuucaugg

SEQ ID NO: 39 - RNA, 2238 nt, homo sapien
agucacagccacagugaccauuagcaggcacccaggccugucuuuggcucggaaacgguggcccccaauguagccuaguuugaaccuaggaacugcaggaccagagagauuccacuggagccugauggacgggugacagagggaacccuacucuggaaacugucagucccagggcacuggggagggcugaggccgaccaugcccagccugcugcugcuguucacggcugcucugcuguccagcugggcucagcuucugacagacgccaacuccugguggucauuagcuuugaacccggugcagagacccgagauguuuaucaucggugcccagcccgugugcagucagcuucccgggcucuccccuggccagaggaagcugugccaauuguaccaggagcacauggccuacauaggggagggagccaagacuggcaucaaggaaugccagcaccaguuccggcagcggcgguggaauugcagcacagcggacaacgcaucugucuuugggagagucaugcagauaggcagccgagagaccgccuucacccacgcggugagcgccgcgggcguggucaacgccaucagccgggccugcagcgagggcgagcucuccaccugcggcugcagccggacggcgcggcccaaggaccugccccgggacuggcuguggggcggcuguggggacaacguggaguacggcuaccgcuucgccaaggaguuuguggaugcccgggagcgagagaagaacuuugccaaaggaucagaggagcagggccgggugcucaugaaccugcaaaacaacgaggccggucgcagggcuguguauaagauggcagacguagccugcaaaugccacggcgucucgggguccugcagccucaagaccugcuggcugcagcuggccgaguuccgcaaggucggggaccggcugaaggagaaguacgacagcgcggccgccaugcgcgucacccgcaagggccggcuggagcuggucaacagccgcuucacccagcccaccccggaggaccuggucuauguggaccccagccccgacuacugccugcgcaacgagagcacgggcucccugggcacgcagggccgccucugcaacaagaccucggagggcauggauggcugugagcucaugugcugcgggcguggcuacaaccaguucaagagcgugcagguggagcgcugccacugcaaguuccacuggugcugcuucgucagguguaagaagugcacggagaucguggaccaguacaucuguaaauagcccggagggccugcucccggccccccugcacucugccucacaaaggucuauauuauauaaaucuauauaaaucuauuuuauauuuguauaaguaaaugggugggugcuauacaauggaaagaugaaaauggaaaggaagagcuuauuuaagagacgcuggagaucucugaggaguggacuuugcugguucucuccucuuggugggugggagacagggcuuuuucucucccucuggcgaggacucucaggauguagggacuuggaaauauuuacugucuguccaccacggccuggaggagggagguugugguuggauggaggagaugaucuugucuggaagucuagagucuuuguugguuagaggacugccugugauccuggccacuaggccaagaggcccuaugaagguggcgggaacucagcuucaaccucgaugucuucagggucuuguccagaauguagauggguuccguaagaggccuggugcucucuuacucuuucauccacgugcacuugugcggcaucugcaguuuacaggaacggcuccuucccuaaaaugagaaguccaaggucaucucuggcccagugaccacagagagaucugcaccucccggacuucaggccugccuuuccagcgagaauucuucauccuccacgguucacuagcuccuaccugaagaggaaagggggccauuugaccugacaugucaggaaagcccuaaacugaauguuugcgccugggcugcagaagccagggugcaugaccaggcugcguggacguuauacugucuucccccacccccggggaggggaagcuugagcugcugcugucacuccuccaccgagggaggccucacaaaccacaggacgcugcaacgggucaggcuggcgggcccggcgugcucaucaucucugccccagguguacgguuucucucugacauuaaaugcccuucaugga

SEQ ID NO: 40 - RNA, 2190 nt, homo sapien
uauucuuccaaauggaaacugcuaauuuuugaagcagaagguugacagcuucaguaagaucucaagagagcgagaagacuggaaucagggaacccuacucuggaaacugucagucccagggcacuggggagggcugaggccgaccaugcccagccugcugcugcuguucacggcugcucugcuguccagcugggcucagcuucugacagacgccaacuccugguggucuuuagcuuugaacccggugcagagacccgagauguuuaucaucggugcccagcccgugugcagucagcuucccgggcucuccccuggccagaggaagcugugccaauuguaccaggagcacauggccuacauaagggagggagccaagacuggcaucaaggaaugccagcaccaguuuccgcagcggcgguggaagugcagcacagcggacaacgcaucugucuuugggagagucaugcagauaggcagccgagagaccgccuucacccacgcggugagcgccgcgggcguggucaacgccaucagccgggccugcagcgagggagagcucuccaccugcggcugcagccggacggcgcggcccaaggaccugccccgggacuggcuguggggcggcuguggggacaacguggaguacggcuaccgcuuugccaaggaguuuguggaugcccgggagcgagagaagaacuuugccaagggaucagaggagcagggccgggugcucaugaaccugcaaaacaacgaggccggucgcagggcuguguauaagauggcagacguagccugcaaaugucacggagucucucggucaugcaggcucaagaccugcuggcugcagcuggccgaguuccgcaaggucggggaccggcugaaggagaaguacgacagcgcggccgccaugcgcgucacccgcaagggccggcuggagcuggucaacagccgcuucacccagcccaccccggaggaccuggucuauguggaccccagccccgacuacugccugcgcaacgagagcacgggcucccugggcacgcagggccgccucugcaacaagaccucggagggcauggauggcugugagcucaugugcugcgggcguggcuacaaccaguucaagagcgugcagguggagcgcugccacugcaaguuccacuggugcugcuucgucagguguaagaagugcacggagaucguggaccaguacaucuguaaauaaccggaggcugcuucccgggccccccuugcacucugccucacaaaggucuauauuauauaaaucuauauuaaaucuauuuuaauauuuguuauaaguaaaugggugggugcuauacaauggaaagauggaaauggaaagggaagagcuuauuuaagagacgcuggagaucucugaggaguggacuuugcugguucucuccucuuggugggugggagacagggcuuuuucucucccucuggugaggacucucaggauguagggacuuggaaauauuuacugucuguccaccacggccuggaggagggagguugugguuggauggaggagaugaucuugucuggaagucuagagucuuuguugguuagaggacugccugugauccuggccacuagccaagaggcccuaugaagguggcgggaacucagcuucaaccucgaugucuucagggucuuguccagaauguagauggguuccguaagaggccuggugcucucuuacucuuucauccacgugcacuugugcggcaucugcaguuuacaggaacggcuccuucccuaaaaugagaaguccaaggucaucucuggcccagugaccacagagagaucugcaccucccggacuucaggccugccuuuccagcgagaauucuucauccuccacgguucacuagcuccuaccugaagaggaaagggggccauuugaccugacaugucaggaaagcccuaaacugaauguuugcgccugggcugcagaagccagggugcaugaccaggcugcguggacguuauacugucuucccccacccccggggaggggaagcuugagcugcugcugucacuccuccaccgagggaggccucacaaaccacaggacgcugcaacgggucaggcuggcgggcccggcgugcucaucaucucugccccagguguacgguuucucucugacauuuaaaugcccuucaugggg

SEQ ID NO: 41 - RNA, 2252 nt, homo sapien
gaccauuagcaggcacccaggccugucuuuggcucggaaacgguggcccccaauguagccuaguuugaaccuaggaacugcaggaccagagagauuccacuggagccugauggacgggugacagagggaacccuacucuggaaacugucagucccagggcacuggggagggcugaggccgaccaugcccagccugcugcugcuguucacggcugcucugcuguccagcugggcucagcuucugacagacgccaacuccugguggucauuagcuuugaacccggugcagagacccgagauguuuaucaucggugcccagcccgugugcagucagcuucccgggcucuccccuggccagaggaagcugugccaauuguaccaggagcacauggccuacauaggggagggagccaagacuggcaucaaggaaugccagcaccaguuccggcagcggcgguggaauugcagcacagcggacaacgcaucugucuuugggagagucaugcagauaggcagccgagagaccgccuucacccacgcggugagcgccgcgggcguggucaacgccaucagccgggccugcagcgagggcgagcucuccaccugcggcugcagccggacggcgcggcccaaggaccugccccgggacuggcuguggggcggcuguggggacaacguggaguacggcuaccgcuucgccaaggaguuuguggaugcccgggagcgagagaagaacuuugccaaaggaucagaggagcagggccgggugcucaugaaccugcaaaacaacgaggccggucgcagggcuguguauaagauggcagacguagccugcaaaugccacggcgucucgggguccugcagccucaagaccugcuggcugcagcuggccgaguuccgcaaggucggggaccggcugaaggagaaguacgacagcgcggccgccaugcgcgucacccgcaagggccggcuggagcuggucaacagccgcuucacccagcccaccccggaggaccuggucuauguggaccccagccccgacuacugccugcgcaacgagagcacgggcucccugggcacgcagggccgccucugcaacaagaccucggagggcauggauggcugugagcucaugugcugcgggcguggcuacaaccaguucaagagcgugcagguggagcgcugccacugcaaguuccacuggugcugcuucgucagguguaagaagugcacggagaucguggaccaguacaucuguaaauagcccggagggccugcucccggcccccccugcacucugccucacaaaggucuauauuauauaaaucuauauaaaucuauuuuauauuuguauaaguaaaugggugggugcuauacaauggaaagaugaaaauggaaaggaagagcuuauuuaagagacgcuggagaucucugaggaguggacuuugcugguucucuccucuuggugggugggagacagggcuuuuucucucccucuggcgaggacucucaggauguagggacuuggaaauauuuacugucuguccaccacggccuggaggagggagguugugguuggauggaggagaugaucuugucuggaagucuagagucuuuguugguuagaggacugccugugauccuggccacuaggccaagaggcccuaugaagguggcgggaacucagcuucaaccucgaugucuucagggucuuguccagaauguagauggguuccguaagaggccuggugcucucuuacucuuucauccacgugcacuugugcggcaucugcaguuuacaggaacggcuccuucccuaaaaugagaaguccaaggucaucucuggcccagugaccacagagagaucugcaccucccggacuucaggccugccuuuccagcgagaauucuucauccuccacgguucacuagcuccuaccugaagaggaaagggggccauuugaccugacaugucaggaaagcccuaaacugaauguuugcgccugggcugcagaagccagggugcaugaccaggcugcguggacguuauacugucuucccccacccccggggaggggaagcuugagcugcugcugucacuccuccaccgagggaggccucacaaaccacaggacgcugcaacgggucaggcuggcgggcccggcgugcucaucaucucugccccagguguacgguuucucucugacauuaaaugcccuucauggaaaaaaaaaaaagaaaaaaaaaaaaaaaa

SEQ ID NO: 42 - RNA, 1304 nt, homo sapien
caauucaccaaaauguuuuaauccuacaaaggagagccugagggucagagaaauaagucucugggcuggaaugagagguaggcacgugggggaguggauaggaugggccccauuucuuuggauguucugcagcaaggacagguaugcuuuacaacagccgaaguggccucccggcugccgaacggaggaacgccgcaagcuccgcucuugaaauuacuuguuuucauuucucuuugugguuucucagcucauuauuucuuuggaaauuagguccugugcaggguucccacaguuugggguaagagacagaaguccuagggugggaagaugagcagugggaggcggaggcuggaaagaggccgagcuucuuuguggggaacacgcagcacguaagcaucagugcaacuuucuccgccucaccccggcuccuggucugcccuuauccgcugaguuuccacacugacucuccauuucuguuuucuccagggaacccuacucuggaaacugucagucccagggcacuggggagggcugaggccgaccaugcccagccugcugcugcuguucacggcugcucugcuguccagcugggcucagcuucugacagacgccaacuccugguggucauuagcuuugaacccggugcagagacccgagauguuuaucaucggugcccagcccgugugcagucagcuucccgggcucuccccuggccagaggaagcugugccaauuguaccaggagcacauggccuacauaggggagggagccaagacuggcaucaaggaaugccagcaccaguuccggcagcggcgguggaauugcagcacagcggacaacgcaucugucuuugggagagucaugcagauaggcagccgagagaccgccuucacccacgcggugagcgccgcgggcguggucaacgccaucagccgggccugcagcgagggcgagcucuccaccugcggcugcagccggacggcgcggcccaaggaccugccccgggacuggcuguggggcggcuguggggacaacguggaguacggcuaccgcuucgccaaggaguuuguggaugcccgggagcgagagaagaacuuugccaaaggaucagaggagcagggccgggugcucaugaaccugcaaaacaacgaggccggucgcagggcuguguauaagauggcagacguagccugcaaaugccacggcgucucgggguccugcagccucaagaccugcuggcugcagcuggccgaguuccgcaaggucggggaccggcugaaggagaaguacgacagcgcggccgc

SEQ ID NO: 43 - RNA, 1560 nt, homo sapien
cgaccaugcccagccugcugcugcuguucacggcugcucugcuguccagcugggcucagcuucugacagacgccaacuccugguggucauuagcuuugaacccggugcagagacccgagauguuuaucaucggugcccagcccgugugcagucagcuucccgggcucuccccuggccagaggaagcugugccaauuguaccaggagcacauggccuacauaggggagggagccaagacuggcaucaaggaaugccagcaccaguuccggcagcggcgguggaauugcagcacagcggacaacgcaucugucuuugggagagucaugcagauaggcagccgagagaccgccuucacccacgcggugagcgccgcgggcguggucaacgccaucagccgggccugcagcgagggcgagcucuccaccugcggcugcagccggacggcgcggcccaaggaccugccccgggacuggcuguggggcggcuguggggacaacguggaguacggcuaccgcuucgccaaggaguuuguggaugcccgggagcgagagaagaacuuugccaaaggaucagaggagcagggccgggugcucaugaaccugcaaaacaacgaggccggucgcagggcuguguauaagauggcagacguagccugcaaaugccacggcgucucgggguccugcagccucaagaccugcuggcugcagcuggccgaguuccgcaaggucggggaccggcugaaggagaaguacgacagcgcggccgccaugcgcgucacccgcaagggccggcuggagcuggucaacagccgcuucacccagcccaccccggaggaccuggucuauguggaccccagccccgacuacugccugcgcaacgagagcacgggcucccugggcacgcagggccgccucugcaacaagaccucggagggcauggauggcugugagcucaugugcugcgggcguggcuacaaccaguucaagagcgugcagguggagcgcugccacugcaaguuccacuggugcugcuucgucagguguaagaagugcacggagaucguggaccaguacaucuguaaauagcccggagggccugcucccggccccccugcacucugccucacaaaggucuauauuauauaaaucuauauaaaucuauuuuauauuuguauaaguaaaugggugggugcuauacaauggaaagaugaaaauggaaaggaagagcuuauuuaagagacgcuggagaucucugaggaguggacuuugcugguucucuccucuuggugggugggagacagggcuuuuucucucccucuggugaggacucucaggauguagggacuuggaaauauuuacugucuguccaccacggccuggaggagggagguugugguuggauggaggagaugaucuugucuggaagucuagagucuuuguugguuagaggacugccugugauccuggccacuaggccaagaggcccuaugaagguggcgggaacucagcuucaaccucgaugucuucagggucuuguccagaauguagauggguuccguaa

SEQ ID NO: 44 - RNA, 1435 nt, homo sapien
aaaugcuccagauccucaguguucaagaaccucaggaagcuucgcaguccugccucgugccugcuugaacagcuggaugugggcaggaggcugugggagcgggccaugccagcagaaucccgccuuacucuggggacuuacucuugucacagccccugguguccugagggucauuucagugucauggaacccuacucuggaaacugucagucccagggcacuggggagggcugaggccgaccaugcccagccugcugcugcuguucacggcugcucugcuguccagcugggcucagcuucugacagacgccaacuccugguggucauuagcuuugaacccggugcagagacccgagauguuuaucaucggugcccagcccgugugcagucagcuucccgggcucuccccuggccagaggaagcugugccaauuguaccaggagcacauggccuacauaggggagggagccaagacuggcaucaaggaaugccagcaccaguuccggcagcggcgguggaauugcagcacagcggacaacgcaucugucuuugggagagucaugcagauaggcagccgagagaccgccuucacccacgcggugagcgccgcgggcguggucaacgccaucagccgggccugccgcgagggcgagcucuccaccugcggcugcagccggacggcgcggcccaaggaccugccccgggacuggcuguggggcggcuguggggacaacguggaguacggcuaccgcuucgccaaggaguuuguggaugcccgggagcgagagaagaacuuugccaaaggaucagaggagcagggccgggugcucaugaaccugcaaaacaacgaggccggucgcagggcuguguauaagauggcagacguagccugcaaaugccacggcgucucgggguccugcagccucaagaccugcuggcugcagcuggccgaguuccgcaaggucggggaccggcugaaggagaaguacgacagcgcggccgccaugcgcgucacccgcaagggccggcuggagcuggaacagccgcuucacccagcccaccccggaggaccuggucuauguggaccccagccccgacuacugccugcgcaacgagagcacgggcucccugggcacgcagggccgccucugcaacaagaccucggagggcauggauggcugugagcucaugugcugcgggcguggcuacaaccaguucaagagcgugcagguggagcgcugccacugcaaguuccacuggugcugcuucgucagguguaagaagugcacggagaucguggaccaguacaucuguaaauagcccggagggccugcucccggccccccugcacucugccucacaaaggucuauauuauauaaaucuauauaaaucuauuuuauauuuguauaaguaaaugggugggugcuauacaau

SEQ ID NO: 45 - RNA, 2182 nt, homo sapien
uauucuuccaaauggaaacugcuaauuuuugaagcagaagguugacagcuucaguaagaucucaagagagcgagaagacuggaaucagggaacccuacucuggaaacugucagucccagggcacuggggagggcugaggccgaccaugcccagccugcugcugcuguucacggcugcucugcuguccagcugggcucagcuucugacagacgccaacuccugguggucauuagcuuugaacccggugcagagacccgagauguuuaucaucggugcccagcccgugugcagucagcuucccgggcucuccccuggccagaggaagcugugccaauuguaccaggagcacauggccuacauaggggagggagccaagacuggcaucaaggaaugccagcaccaguuccggcagcggcgguggaauugcagcacagcggacaacgcaucugucuuugggagagucaugcagauaggcagccgagagaccgccuucacccacgcggugagcgccgcgggcguggucaacgccaucagccgggccugccgcgagggcgagcucuccaccugcggcugcagccggacggcgcggcccaaggaccugccccgggacuggcuguggggcggcuguggggacaacguggaguacggcuaccgcuucgccaaggaguuuguggaugcccgggagcgagagaagaacuuugccaaaggaucagaggagcagggccgggugcucaugaaccugcaaaacaacgaggccggucgcagggcuguguauaagauggcagacguagccugcaaaugccacggcgucucgggguccugcagccucaagaccugcuggcugcagcuggccgaguuccgcaaggucggggaccggcugaaggagaaguacgacagcgcggccgccaugcgcgucacccgcaagggccggcuggagcuggaacagccgcuucacccagcccaccccggaggaccuggucuauguggaccccagccccgacuacugccugcgcaacgagagcacgggcucccugggcacgcagggccgccucugcaacaagaccucggagggcauggauggcugugagcucaugugcugcgggcguggcuacaaccaguucaagagcgugcagguggagcgcugccacugcaaguuccacuggugcugcuucgucagguguaagaagugcacggagaucguggaccaguacaucuguaaauagcccggagggccugcucccggccccccugcacucugccucacaaaggucuauauuauauaaaucuauauaaaucuauuuuauauuuguauaaguaaaugggugggugcuauacaauggaaagaugaaaauggaaaggaagagcuuauuuaagagacgcuggagaucucugaggaguggacuuugcugguucucuccucuuggugggugggagacagggcuuuuucucucccucuggcgaggacucucaggauguagggacuuggaaauauuuacugucuguccaccacggccuggaggagggagguugugguuggauggaggagaugaucuugucuggaagucuagagucuuuguugguuagaggacugccugugauccuggccacuaggccaagaggcccuaugaagguggcgggaacucagcuucaaccucgaugucuucagggucuuguccagaauguagauggguuccguaagaggccuggugcucucuuacucuuucauccacgugcacuugugcggcaucugcaguuuacaggaacggcuccuucccuaaaaugagaaguccaaggucaucucuggcccagugaccacagagagaucugcaccucccggacuucaggccugccuuuccagcgagaauucuucauccuccacgguucacuagcuccuaccugaagaggaaagggggccauuugaccugacaugucaggaaagcccuaaacugaauguuugcgccugggcugcagaagccagggugcaugaccaggcugcguggacguuauacugucuucccccacccccggggaggggaagcuugagcugcugcugucacuccuccaccgagggaggccucacaaaccacaggacgcugcaacgggucaggcuggcgggcccggcgugcucaucaucucugccccagguguacgguuucucucugacauuaaaugcccuucaugg

SEQ ID NO: 46 - RNA, 2236 nt, homo sapien
agucacagccacagugaccauuagcaggcacccaggccugucuuuggcucggaaacgguggcccccaauguagccuaguuugaaccuaggaacugcaggaccagagagauuccacuggagccugauggacgggugacagagggaacccuacucuggaaacugucagucccagggcacuggggagggcugaggccgaccaugcccagccugcugcugcuguucacggcugcucugcuguccagcugggcucagcuucugacagacgccaacuccugguggucauuagcuuugaacccggugcagagacccgagauguuuaucaucggugcccagcccgugugcagucagcuucccgggcucuccccuggccagaggaagcugugccaauuguaccaggagcacauggccuacauaggggagggagccaagacuggcaucaaggaaugccagcaccaguuccggcagcggcgguggaauugcagcacagcggacaacgcaucugucuuugggagagucaugcagauaggcagccgagagaccgccuucacccacgcggugagcgccgcgggcguggucaacgccaucagccgggccugccgcgagggcgagcucuccaccugcggcugcagccggacggcgcggcccaaggaccugccccgggacuggcuguggggcggcuguggggacaacguggaguacggcuaccgcuucgccaaggaguuuguggaugcccgggagcgagagaagaacuuugccaaaggaucagaggagcagggccgggugcucaugaaccugcaaaacaacgaggccggucgcagggcuguguauaagauggcagacguagccugcaaaugccacggcgucucgggguccugcagccucaagaccugcuggcugcagcuggccgaguuccgcaaggucggggaccggcugaaggagaaguacgacagcgcggccgccaugcgcgucacccgcaagggccggcuggagcuggaacagccgcuucacccagcccaccccggaggaccuggucuauguggaccccagccccgacuacugccugcgcaacgagagcacgggcucccugggcacgcagggccgccucugcaacaagaccucggagggcauggauggcugugagcucaugugcugcgggcguggcuacaaccaguucaagagcgugcagguggagcgcugccacugcaaguuccacuggugcugcuucgucagguguaagaagugcacggagaucguggaccaguacaucuguaaauagcccggagggccugcucccggccccccugcacucugccucacaaaggucuauauuauauaaaucuauauaaaucuauuuuauauuuguauaaguaaaugggugggugcuauacaauggaaagaugaaaauggaaaggaagagcuuauuuaagagacgcuggagaucucugaggaguggacuuugcugguucucuccucuuggugggugggagacagggcuuuuucucucccucuggcgaggacucucaggauguagggacuuggaaauauuuacugucuguccaccacggccuggaggagggagguugugguuggauggaggagaugaucuugucuggaagucuagagucuuuguugguuagaggacugccugugauccuggccacuaggccaagaggcccuaugaagguggcgggaacucagcuucaaccucgaugucuucagggucuuguccagaauguagauggguuccguaagaggccuggugcucucuuacucuuucauccacgugcacuugugcggcaucugcaguuuacaggaacggcuccuucccuaaaaugagaaguccaaggucaucucuggcccagugaccacagagagaucugcaccucccggacuucaggccugccuuuccagcgagaauucuucauccuccacgguucacuagcuccuaccugaagaggaaagggggccauuugaccugacaugucaggaaagcccuaaacugaauguuugcgccugggcugcagaagccagggugcaugaccaggcugcguggacguuauacugucuucccccacccccggggaggggaagcuugagcugcugcugucacuccuccaccgagggaggccucacaaaccacaggacgcugcaacgggucaggcuggcgggcccggcgugcucaucaucucugccccagguguacgguuucucucugacauuaaaugcccuucaugga

SEQ ID NO: 47 - RNA, 2188 nt, homo sapien
uauucuuccaaauggaaacugcuaauuuuugaagcagaagguugacagcuucaguaagaucucaagagagcgagaagacuggaaucagggaacccuacucuggaaacugucagucccagggcacuggggagggcugaggccgaccaugcccagccugcugcugcuguucacggcugcucugcuguccagcugggcucagcuucugacagacgccaacuccugguggucuuuagcuuugaacccggugcagagacccgagauguuuaucaucggugcccagcccgugugcagucagcuucccgggcucuccccuggccagaggaagcugugccaauuguaccaggagcacauggccuacauaagggagggagccaagacuggcaucaaggaaugccagcaccaguuuccgcagcggcgguggaagugcagcacagcggacaacgcaucugucuuugggagagucaugcagauaggcagccgagagaccgccuucacccacgcggugagcgccgcgggcguggucaacgccaucagccgggccugccgcgagggagagcucuccaccugcggcugcagccggacggcgcggcccaaggaccugccccgggacuggcuguggggcggcuguggggacaacguggaguacggcuaccgcuuugccaaggaguuuguggaugcccgggagcgagagaagaacuuugccaagggaucagaggagcagggccgggugcucaugaaccugcaaaacaacgaggccggucgcagggcuguguauaagauggcagacguagccugcaaaugucacggagucucucggucaugcaggcucaagaccugcuggcugcagcuggccgaguuccgcaaggucggggaccggcugaaggagaaguacgacagcgcggccgccaugcgcgucacccgcaagggccggcuggagcuggaacagccgcuucacccagcccaccccggaggaccuggucuauguggaccccagccccgacuacugccugcgcaacgagagcacgggcucccugggcacgcagggccgccucugcaacaagaccucggagggcauggauggcugugagcucaugugcugcgggcguggcuacaaccaguucaagagcgugcagguggagcgcugccacugcaaguuccacuggugcugcuucgucagguguaagaagugcacggagaucguggaccaguacaucuguaaauaaccggaggcugcuucccgggccccccuugcacucugccucacaaaggucuauauuauauaaaucuauauuaaaucuauuuuaauauuuguuauaaguaaaugggugggugcuauacaauggaaagauggaaauggaaagggaagagcuuauuuaagagacgcuggagaucucugaggaguggacuuugcugguucucuccucuuggugggugggagacagggcuuuuucucucccucuggugaggacucucaggauguagggacuuggaaauauuuacugucuguccaccacggccuggaggagggagguugugguuggauggaggagaugaucuugucuggaagucuagagucuuuguugguuagaggacugccugugauccuggccacuagccaagaggcccuaugaagguggcgggaacucagcuucaaccucgaugucuucagggucuuguccagaauguagauggguuccguaagaggccuggugcucucuuacucuuucauccacgugcacuugugcggcaucugcaguuuacaggaacggcuccuucccuaaaaugagaaguccaaggucaucucuggcccagugaccacagagagaucugcaccucccggacuucaggccugccuuuccagcgagaauucuucauccuccacgguucacuagcuccuaccugaagaggaaagggggccauuugaccugacaugucaggaaagcccuaaacugaauguuugcgccugggcugcagaagccagggugcaugaccaggcugcguggacguuauacugucuucccccacccccggggaggggaagcuugagcugcugcugucacuccuccaccgagggaggccucacaaaccacaggacgcugcaacgggucaggcuggcgggcccggcgugcucaucaucucugccccagguguacgguuucucucugacauuuaaaugcccuucaugggg

SEQ ID NO: 48 - RNA, 2250 nt, homo sapien
gaccauuagcaggcacccaggccugucuuuggcucggaaacgguggcccccaauguagccuaguuugaaccuaggaacugcaggaccagagagauuccacuggagccugauggacgggugacagagggaacccuacucuggaaacugucagucccagggcacuggggagggcugaggccgaccaugcccagccugcugcugcuguucacggcugcucugcuguccagcugggcucagcuucugacagacgccaacuccugguggucauuagcuuugaacccggugcagagacccgagauguuuaucaucggugcccagcccgugugcagucagcuucccgggcucuccccuggccagaggaagcugugccaauuguaccaggagcacauggccuacauaggggagggagccaagacuggcaucaaggaaugccagcaccaguuccggcagcggcgguggaauugcagcacagcggacaacgcaucugucuuugggagagucaugcagauaggcagccgagagaccgccuucacccacgcggugagcgccgcgggcguggucaacgccaucagccgggccugccgcgagggcgagcucuccaccugcggcugcagccggacggcgcggcccaaggaccugccccgggacuggcuguggggcggcuguggggacaacguggaguacggcuaccgcuucgccaaggaguuuguggaugcccgggagcgagagaagaacuuugccaaaggaucagaggagcagggccgggugcucaugaaccugcaaaacaacgaggccggucgcagggcuguguauaagauggcagacguagccugcaaaugccacggcgucucgggguccugcagccucaagaccugcuggcugcagcuggccgaguuccgcaaggucggggaccggcugaaggagaaguacgacagcgcggccgccaugcgcgucacccgcaagggccggcuggagcuggaacagccgcuucacccagcccaccccggaggaccuggucuauguggaccccagccccgacuacugccugcgcaacgagagcacgggcucccugggcacgcagggccgccucugcaacaagaccucggagggcauggauggcugugagcucaugugcugcgggcguggcuacaaccaguucaagagcgugcagguggagcgcugccacugcaaguuccacuggugcugcuucgucagguguaagaagugcacggagaucguggaccaguacaucuguaaauagcccggagggccugcucccggcccccccugcacucugccucacaaaggucuauauuauauaaaucuauauaaaucuauuuuauauuuguauaaguaaaugggugggugcuauacaauggaaagaugaaaauggaaaggaagagcuuauuuaagagacgcuggagaucucugaggaguggacuuugcugguucucuccucuuggugggugggagacagggcuuuuucucucccucuggcgaggacucucaggauguagggacuuggaaauauuuacugucuguccaccacggccuggaggagggagguugugguuggauggaggagaugaucuugucuggaagucuagagucuuuguugguuagaggacugccugugauccuggccacuaggccaagaggcccuaugaagguggcgggaacucagcuucaaccucgaugucuucagggucuuguccagaauguagauggguuccguaagaggccuggugcucucuuacucuuucauccacgugcacuugugcggcaucugcaguuuacaggaacggcuccuucccuaaaaugagaaguccaaggucaucucuggcccagugaccacagagagaucugcaccucccggacuucaggccugccuuuccagcgagaauucuucauccuccacgguucacuagcuccuaccugaagaggaaagggggccauuugaccugacaugucaggaaagcccuaaacugaauguuugcgccugggcugcagaagccagggugcaugaccaggcugcguggacguuauacugucuucccccacccccggggaggggaagcuugagcugcugcugucacuccuccaccgagggaggccucacaaaccacaggacgcugcaacgggucaggcuggcgggcccggcgugcucaucaucucugccccagguguacgguuucucucugacauuaaaugcccuucauggaaaaaaaaaaaagaaaaaaaaaaaaaaaa

SEQ ID NO: 49 - RNA, 1558 nt, homo sapien
cgaccaugcccagccugcugcugcuguucacggcugcucugcuguccagcugggcucagcuucugacagacgccaacuccugguggucauuagcuuugaacccggugcagagacccgagauguuuaucaucggugcccagcccgugugcagucagcuucccgggcucuccccuggccagaggaagcugugccaauuguaccaggagcacauggccuacauaggggagggagccaagacuggcaucaaggaaugccagcaccaguuccggcagcggcgguggaauugcagcacagcggacaacgcaucugucuuugggagagucaugcagauaggcagccgagagaccgccuucacccacgcggugagcgccgcgggcguggucaacgccaucagccgggccugccgcgagggcgagcucuccaccugcggcugcagccggacggcgcggcccaaggaccugccccgggacuggcuguggggcggcuguggggacaacguggaguacggcuaccgcuucgccaaggaguuuguggaugcccgggagcgagagaagaacuuugccaaaggaucagaggagcagggccgggugcucaugaaccugcaaaacaacgaggccggucgcagggcuguguauaagauggcagacguagccugcaaaugccacggcgucucgggguccugcagccucaagaccugcuggcugcagcuggccgaguuccgcaaggucggggaccggcugaaggagaaguacgacagcgcggccgccaugcgcgucacccgcaagggccggcuggagcuggaacagccgcuucacccagcccaccccggaggaccuggucuauguggaccccagccccgacuacugccugcgcaacgagagcacgggcucccugggcacgcagggccgccucugcaacaagaccucggagggcauggauggcugugagcucaugugcugcgggcguggcuacaaccaguucaagagcgugcagguggagcgcugccacugcaaguuccacuggugcugcuucgucagguguaagaagugcacggagaucguggaccaguacaucuguaaauagcccggagggccugcucccggccccccugcacucugccucacaaaggucuauauuauauaaaucuauauaaaucuauuuuauauuuguauaaguaaaugggugggugcuauacaauggaaagaugaaaauggaaaggaagagcuuauuuaagagacgcuggagaucucugaggaguggacuuugcugguucucuccucuuggugggugggagacagggcuuuuucucucccucuggugaggacucucaggauguagggacuuggaaauauuuacugucuguccaccacggccuggaggagggagguugugguuggauggaggagaugaucuugucuggaagucuagagucuuuguugguuagaggacugccugugauccuggccacuaggccaagaggcccuaugaagguggcgggaacucagcuucaaccucgaugucuucagggucuuguccagaauguagauggguuccguaa

SEQ ID NO: 50 - DNA, 1437 bp, homo sapien
aaatgctccagatcctcagtgttcaagaacctcaggaagcttcgcagtcctgcctcgtgcctgcttgaacagctggatgtgggcaggaggctgtgggagcgggccatgccagcagaatcccgccttactctggggacttactcttgtcacagcccctggtgtcctgagggtcatttcagtgtcatggaaccctactctggaaactgtcagtcccagggcactggggagggctgaggccgaccatgcccagcctgctgctgctgttcacggctgctctgctgtccagctgggctcagcttctgacagacgccaactcctggtggtcattagctttgaacccggtgcagagacccgagatgtttatcatcggtgcccagcccgtgtgcagtcagcttcccgggctctcccctggccagaggaagctgtgccaattgtaccaggagcacatggcctacataggggagggagccaagactggcatcaaggaatgccagcaccagttccggcagcggcggtggaattgcagcacagcggacaacgcatctgtctttgggagagtcatgcagataggcagccgagagaccgccttcacccacgcggtgagcgccgcgggcgtggtcaacgccatcagccgggcctgccgcgagggcgagctctccacctgcggctgcagccggacggcgcggcccaaggacctgccccgggactggctgtggggcggctgtggggacaacgtggagtacggctaccgcttcgccaaggagtttgtggatgcccgggagcgagagaagaactttgccaaaggatcagaggagcagggccgggtgctcatgaacctgcaaaacaacgaggccggtcgcagggctgtgtataagatggcagacgtagcctgcaaatgccacggcgtctcggggtcctgcagcctcaagacctgctggctgcagctggccgagttccgcaaggtcggggaccggctgaaggagaagtacgacagcgcggccgccatgcgcgtcacccgcaagggccggctggagctggtcaacagccgcttcacccagcccaccccggaggacctggtctatgtggaccccagccccgactactgcctgcgcaacgagagcacgggctccctgggcacgcagggccgcctctgcaacaagacctcggagggcatggatggctgtgagctcatgtgctgcgggcgtggctacaaccagttcaagagcgtgcaggtggagcgctgccactgcaagttccactggtgctgcttcgtcaggtgtaagaagtgcacggagatcgtggaccagtacatctgtaaatagcccggagggcctgctcccggcccccctgcactctgcctcacaaaggtctatattatataaatctatataaatctattttatatttgtataagtaaatgggtgggtgctatacaat

SEQ ID NO: 51 - DNA, 2184 bp, homo sapien
tattcttccaaatggaaactgctaatttttgaagcagaaggttgacagcttcagtaagatctcaagagagcgagaagactggaatcagggaaccctactctggaaactgtcagtcccagggcactggggagggctgaggccgaccatgcccagcctgctgctgctgttcacggctgctctgctgtccagctgggctcagcttctgacagacgccaactcctggtggtcattagctttgaacccggtgcagagacccgagatgtttatcatcggtgcccagcccgtgtgcagtcagcttcccgggctctcccctggccagaggaagctgtgccaattgtaccaggagcacatggcctacataggggagggagccaagactggcatcaaggaatgccagcaccagttccggcagcggcggtggaattgcagcacagcggacaacgcatctgtctttgggagagtcatgcagataggcagccgagagaccgccttcacccacgcggtgagcgccgcgggcgtggtcaacgccatcagccgggcctgccgcgagggcgagctctccacctgcggctgcagccggacggcgcggcccaaggacctgccccgggactggctgtggggcggctgtggggacaacgtggagtacggctaccgcttcgccaaggagtttgtggatgcccgggagcgagagaagaactttgccaaaggatcagaggagcagggccgggtgctcatgaacctgcaaaacaacgaggccggtcgcagggctgtgtataagatggcagacgtagcctgcaaatgccacggcgtctcggggtcctgcagcctcaagacctgctggctgcagctggccgagttccgcaaggtcggggaccggctgaaggagaagtacgacagcgcggccgccatgcgcgtcacccgcaagggccggctggagctggtcaacagccgcttcacccagcccaccccggaggacctggtctatgtggaccccagccccgactactgcctgcgcaacgagagcacgggctccctgggcacgcagggccgcctctgcaacaagacctcggagggcatggatggctgtgagctcatgtgctgcgggcgtggctacaaccagttcaagagcgtgcaggtggagcgctgccactgcaagttccactggtgctgcttcgtcaggtgtaagaagtgcacggagatcgtggaccagtacatctgtaaatagcccggagggcctgctcccggcccccctgcactctgcctcacaaaggtctatattatataaatctatataaatctattttatatttgtataagtaaatgggtgggtgctatacaatggaaagatgaaaatggaaaggaagagcttatttaagagacgctggagatctctgaggagtggactttgctggttctctcctcttggtgggtgggagacagggctttttctctccctctggcgaggactctcaggatgtagggacttggaaatatttactgtctgtccaccacggcctggaggagggaggttgtggttggatggaggagatgatcttgtctggaagtctagagtctttgttggttagaggactgcctgtgatcctggccactaggccaagaggccctatgaaggtggcgggaactcagcttcaacctcgatgtcttcagggtcttgtccagaatgtagatgggttccgtaagaggcctggtgctctcttactctttcatccacgtgcacttgtgcggcatctgcagtttacaggaacggctccttccctaaaatgagaagtccaaggtcatctctggcccagtgaccacagagagatctgcacctcccggacttcaggcctgcctttccagcgagaattcttcatcctccacggttcactagctcctacctgaagaggaaagggggccatttgacctgacatgtcaggaaagccctaaactgaatgtttgcgcctgggctgcagaagccagggtgcatgaccaggctgcgtggacgttatactgtcttcccccacccccggggaggggaagcttgagctgctgctgtcactcctccaccgagggaggcctcacaaaccacaggacgctgcaacgggtcaggctggcgggcccggcgtgctcatcatctctgccccaggtgtacggtttctctctgacattaaatgcccttcatgg

SEQ ID NO: 52 - DNA, 2238 bp, homo sapien
agtcacagccacagtgaccattagcaggcacccaggcctgtctttggctcggaaacggtggcccccaatgtagcctagtttgaacctaggaactgcaggaccagagagattccactggagcctgatggacgggtgacagagggaaccctactctggaaactgtcagtcccagggcactggggagggctgaggccgaccatgcccagcctgctgctgctgttcacggctgctctgctgtccagctgggctcagcttctgacagacgccaactcctggtggtcattagctttgaacccggtgcagagacccgagatgtttatcatcggtgcccagcccgtgtgcagtcagcttcccgggctctcccctggccagaggaagctgtgccaattgtaccaggagcacatggcctacataggggagggagccaagactggcatcaaggaatgccagcaccagttccggcagcggcggtggaattgcagcacagcggacaacgcatctgtctttgggagagtcatgcagataggcagccgagagaccgccttcacccacgcggtgagcgccgcgggcgtggtcaacgccatcagccgggcctgccgcgagggcgagctctccacctgcggctgcagccggacggcgcggcccaaggacctgccccgggactggctgtggggcggctgtggggacaacgtggagtacggctaccgcttcgccaaggagtttgtggatgcccgggagcgagagaagaactttgccaaaggatcagaggagcagggccgggtgctcatgaacctgcaaaacaacgaggccggtcgcagggctgtgtataagatggcagacgtagcctgcaaatgccacggcgtctcggggtcctgcagcctcaagacctgctggctgcagctggccgagttccgcaaggtcggggaccggctgaaggagaagtacgacagcgcggccgccatgcgcgtcacccgcaagggccggctggagctggtcaacagccgcttcacccagcccaccccggaggacctggtctatgtggaccccagccccgactactgcctgcgcaacgagagcacgggctccctgggcacgcagggccgcctctgcaacaagacctcggagggcatggatggctgtgagctcatgtgctgcgggcgtggctacaaccagttcaagagcgtgcaggtggagcgctgccactgcaagttccactggtgctgcttcgtcaggtgtaagaagtgcacggagatcgtggaccagtacatctgtaaatagcccggagggcctgctcccggcccccctgcactctgcctcacaaaggtctatattatataaatctatataaatctattttatatttgtataagtaaatgggtgggtgctatacaatggaaagatgaaaatggaaaggaagagcttatttaagagacgctggagatctctgaggagtggactttgctggttctctcctcttggtgggtgggagacagggctttttctctccctctggcgaggactctcaggatgtagggacttggaaatatttactgtctgtccaccacggcctggaggagggaggttgtggttggatggaggagatgatcttgtctggaagtctagagtctttgttggttagaggactgcctgtgatcctggccactaggccaagaggccctatgaaggtggcgggaactcagcttcaacctcgatgtcttcagggtcttgtccagaatgtagatgggttccgtaagaggcctggtgctctcttactctttcatccacgtgcacttgtgcggcatctgcagtttacaggaacggctccttccctaaaatgagaagtccaaggtcatctctggcccagtgaccacagagagatctgcacctcccggacttcaggcctgcctttccagcgagaattcttcatcctccacggttcactagctcctacctgaagaggaaagggggccatttgacctgacatgtcaggaaagccctaaactgaatgtttgcgcctgggctgcagaagccagggtgcatgaccaggctgcgtggacgttatactgtcttcccccacccccggggaggggaagcttgagctgctgctgtcactcctccaccgagggaggcctcacaaaccacaggacgctgcaacgggtcaggctggcgggcccggcgtgctcatcatctctgccccaggtgtacggtttctctctgacattaaatgcccttcatgga

SEQ ID NO: 53 - DNA, 508 bp, homo sapien
actgtcagtcccagggcactggggagggctgaggccgaccatgcccagcctgctgctgctgttcacggctgctctgctgtccagctgggctcagcttctgacagacgccaactcctggtggtcattagctttgaacccggtgcagagacccgagatgtttatcatcggtgcccagcccgtgtgcagtcagcttcccgggctctcccctggccagaggaagctgtgccaattgtaccaggagcacatggcctacataggggagggagccaagactggcatcaaggaatgccagcaccagttccggcagcggcggtggaattgcagcacagcggacaacgcatctgtctttgggagagtcatgcagataggctgtgtataagatggcagacgtagcctgcaaatgccacggcgtctcggggtcctgcagcctcaagacctgctggctgcagctggccgagttccgcaaggtcggggaccggctgaaggagaagtacgacagcgcggccgc

SEQ ID NO: 54 - DNA, 2190 bp, homo sapien
tattcttccaaatggaaactgctaatttttgaagcagaaggttgacagcttcagtaagatctcaagagagcgagaagactggaatcagggaaccctactctggaaactgtcagtcccagggcactggggagggctgaggccgaccatgcccagcctgctgctgctgttcacggctgctctgctgtccagctgggctcagcttctgacagacgccaactcctggtggtctttagctttgaacccggtgcagagacccgagatgtttatcatcggtgcccagcccgtgtgcagtcagcttcccgggctctcccctggccagaggaagctgtgccaattgtaccaggagcacatggcctacataagggagggagccaagactggcatcaaggaatgccagcaccagtttccgcagcggcggtggaagtgcagcacagcggacaacgcatctgtctttgggagagtcatgcagataggcagccgagagaccgccttcacccacgcggtgagcgccgcgggcgtggtcaacgccatcagccgggcctgccgcgagggagagctctccacctgcggctgcagccggacggcgcggcccaaggacctgccccgggactggctgtggggcggctgtggggacaacgtggagtacggctaccgctttgccaaggagtttgtggatgcccgggagcgagagaagaactttgccaagggatcagaggagcagggccgggtgctcatgaacctgcaaaacaacgaggccggtcgcagggctgtgtataagatggcagacgtagcctgcaaatgtcacggagtctctcggtcatgcaggctcaagacctgctggctgcagctggccgagttccgcaaggtcggggaccggctgaaggagaagtacgacagcgcggccgccatgcgcgtcacccgcaagggccggctggagctggtcaacagccgcttcacccagcccaccccggaggacctggtctatgtggaccccagccccgactactgcctgcgcaacgagagcacgggctccctgggcacgcagggccgcctctgcaacaagacctcggagggcatggatggctgtgagctcatgtgctgcgggcgtggctacaaccagttcaagagcgtgcaggtggagcgctgccactgcaagttccactggtgctgcttcgtcaggtgtaagaagtgcacggagatcgtggaccagtacatctgtaaataaccggaggctgcttcccgggccccccttgcactctgcctcacaaaggtctatattatataaatctatattaaatctattttaatatttgttataagtaaatgggtgggtgctatacaatggaaagatggaaatggaaagggaagagcttatttaagagacgctggagatctctgaggagtggactttgctggttctctcctcttggtgggtgggagacagggctttttctctccctctggtgaggactctcaggatgtagggacttggaaatatttactgtctgtccaccacggcctggaggagggaggttgtggttggatggaggagatgatcttgtctggaagtctagagtctttgttggttagaggactgcctgtgatcctggccactagccaagaggccctatgaaggtggcgggaactcagcttcaacctcgatgtcttcagggtcttgtccagaatgtagatgggttccgtaagaggcctggtgctctcttactctttcatccacgtgcacttgtgcggcatctgcagtttacaggaacggctccttccctaaaatgagaagtccaaggtcatctctggcccagtgaccacagagagatctgcacctcccggacttcaggcctgcctttccagcgagaattcttcatcctccacggttcactagctcctacctgaagaggaaagggggccatttgacctgacatgtcaggaaagccctaaactgaatgtttgcgcctgggctgcagaagccagggtgcatgaccaggctgcgtggacgttatactgtcttcccccacccccggggaggggaagcttgagctgctgctgtcactcctccaccgagggaggcctcacaaaccacaggacgctgcaacgggtcaggctggcgggcccggcgtgctcatcatctctgccccaggtgtacggtttctctctgacatttaaatgcccttcatgggg

SEQ ID NO: 55 - DNA, 2252 bp, homo sapien
gaccattagcaggcacccaggcctgtctttggctcggaaacggtggcccccaatgtagcctagtttgaacctaggaactgcaggaccagagagattccactggagcctgatggacgggtgacagagggaaccctactctggaaactgtcagtcccagggcactggggagggctgaggccgaccatgcccagcctgctgctgctgttcacggctgctctgctgtccagctgggctcagcttctgacagacgccaactcctggtggtcattagctttgaacccggtgcagagacccgagatgtttatcatcggtgcccagcccgtgtgcagtcagcttcccgggctctcccctggccagaggaagctgtgccaattgtaccaggagcacatggcctacataggggagggagccaagactggcatcaaggaatgccagcaccagttccggcagcggcggtggaattgcagcacagcggacaacgcatctgtctttgggagagtcatgcagataggcagccgagagaccgccttcacccacgcggtgagcgccgcgggcgtggtcaacgccatcagccgggcctgccgcgagggcgagctctccacctgcggctgcagccggacggcgcggcccaaggacctgccccgggactggctgtggggcggctgtggggacaacgtggagtacggctaccgcttcgccaaggagtttgtggatgcccgggagcgagagaagaactttgccaaaggatcagaggagcagggccgggtgctcatgaacctgcaaaacaacgaggccggtcgcagggctgtgtataagatggcagacgtagcctgcaaatgccacggcgtctcggggtcctgcagcctcaagacctgctggctgcagctggccgagttccgcaaggtcggggaccggctgaaggagaagtacgacagcgcggccgccatgcgcgtcacccgcaagggccggctggagctggtcaacagccgcttcacccagcccaccccggaggacctggtctatgtggaccccagccccgactactgcctgcgcaacgagagcacgggctccctgggcacgcagggccgcctctgcaacaagacctcggagggcatggatggctgtgagctcatgtgctgcgggcgtggctacaaccagttcaagagcgtgcaggtggagcgctgccactgcaagttccactggtgctgcttcgtcaggtgtaagaagtgcacggagatcgtggaccagtacatctgtaaatagcccggagggcctgctcccggccccccctgcactctgcctcacaaaggtctatattatataaatctatataaatctattttatatttgtataagtaaatgggtgggtgctatacaatggaaagatgaaaatggaaaggaagagcttatttaagagacgctggagatctctgaggagtggactttgctggttctctcctcttggtgggtgggagacagggctttttctctccctctggcgaggactctcaggatgtagggacttggaaatatttactgtctgtccaccacggcctggaggagggaggttgtggttggatggaggagatgatcttgtctggaagtctagagtctttgttggttagaggactgcctgtgatcctggccactaggccaagaggccctatgaaggtggcgggaactcagcttcaacctcgatgtcttcagggtcttgtccagaatgtagatgggttccgtaagaggcctggtgctctcttactctttcatccacgtgcacttgtgcggcatctgcagtttacaggaacggctccttccctaaaatgagaagtccaaggtcatctctggcccagtgaccacagagagatctgcacctcccggacttcaggcctgcctttccagcgagaattcttcatcctccacggttcactagctcctacctgaagaggaaagggggccatttgacctgacatgtcaggaaagccctaaactgaatgtttgcgcctgggctgcagaagccagggtgcatgaccaggctgcgtggacgttatactgtcttcccccacccccggggaggggaagcttgagctgctgctgtcactcctccaccgagggaggcctcacaaaccacaggacgctgcaacgggtcaggctggcgggcccggcgtgctcatcatctctgccccaggtgtacggtttctctctgacattaaatgcccttcatggaaaaaaaaaaaagaaaaaaaaaaaaaaaa

SEQ ID NO: 56 - DNA, 1304 bp, homo sapien
caattcaccaaaatgttttaatcctacaaaggagagcctgagggtcagagaaataagtctctgggctggaatgagaggtaggcacgtgggggagtggataggatgggccccatttctttggatgttctgcagcaaggacaggtatgctttacaacagccgaagtggcctcccggctgccgaacggaggaacgccgcaagctccgctcttgaaattacttgttttcatttctctttgtggtttctcagctcattatttctttggaaattaggtcctgtgcagggttcccacagtttggggtaagagacagaagtcctagggtgggaagatgagcagtgggaggcggaggctggaaagaggccgagcttctttgtggggaacacgcagcacgtaagcatcagtgcaactttctccgcctcaccccggctcctggtctgcccttatccgctgagtttccacactgactctccatttctgttttctccagggaaccctactctggaaactgtcagtcccagggcactggggagggctgaggccgaccatgcccagcctgctgctgctgttcacggctgctctgctgtccagctgggctcagcttctgacagacgccaactcctggtggtcattagctttgaacccggtgcagagacccgagatgtttatcatcggtgcccagcccgtgtgcagtcagcttcccgggctctcccctggccagaggaagctgtgccaattgtaccaggagcacatggcctacataggggagggagccaagactggcatcaaggaatgccagcaccagttccggcagcggcggtggaattgcagcacagcggacaacgcatctgtctttgggagagtcatgcagataggcagccgagagaccgccttcacccacgcggtgagcgccgcgggcgtggtcaacgccatcagccgggcctgccgcgagggcgagctctccacctgcggctgcagccggacggcgcggcccaaggacctgccccgggactggctgtggggcggctgtggggacaacgtggagtacggctaccgcttcgccaaggagtttgtggatgcccgggagcgagagaagaactttgccaaaggatcagaggagcagggccgggtgctcatgaacctgcaaaacaacgaggccggtcgcagggctgtgtataagatggcagacgtagcctgcaaatgccacggcgtctcggggtcctgcagcctcaagacctgctggctgcagctggccgagttccgcaaggtcggggaccggctgaaggagaagtacgacagcgcggccgc

SEQ ID NO: 57 - DNA, 1560 bp, homo sapien
cgaccatgcccagcctgctgctgctgttcacggctgctctgctgtccagctgggctcagcttctgacagacgccaactcctggtggtcattagctttgaacccggtgcagagacccgagatgtttatcatcggtgcccagcccgtgtgcagtcagcttcccgggctctcccctggccagaggaagctgtgccaattgtaccaggagcacatggcctacataggggagggagccaagactggcatcaaggaatgccagcaccagttccggcagcggcggtggaattgcagcacagcggacaacgcatctgtctttgggagagtcatgcagataggcagccgagagaccgccttcacccacgcggtgagcgccgcgggcgtggtcaacgccatcagccgggcctgccgcgagggcgagctctccacctgcggctgcagccggacggcgcggcccaaggacctgccccgggactggctgtggggcggctgtggggacaacgtggagtacggctaccgcttcgccaaggagtttgtggatgcccgggagcgagagaagaactttgccaaaggatcagaggagcagggccgggtgctcatgaacctgcaaaacaacgaggccggtcgcagggctgtgtataagatggcagacgtagcctgcaaatgccacggcgtctcggggtcctgcagcctcaagacctgctggctgcagctggccgagttccgcaaggtcggggaccggctgaaggagaagtacgacagcgcggccgccatgcgcgtcacccgcaagggccggctggagctggtcaacagccgcttcacccagcccaccccggaggacctggtctatgtggaccccagccccgactactgcctgcgcaacgagagcacgggctccctgggcacgcagggccgcctctgcaacaagacctcggagggcatggatggctgtgagctcatgtgctgcgggcgtggctacaaccagttcaagagcgtgcaggtggagcgctgccactgcaagttccactggtgctgcttcgtcaggtgtaagaagtgcacggagatcgtggaccagtacatctgtaaatagcccggagggcctgctcccggcccccctgcactctgcctcacaaaggtctatattatataaatctatataaatctattttatatttgtataagtaaatgggtgggtgctatacaatggaaagatgaaaatggaaaggaagagcttatttaagagacgctggagatctctgaggagtggactttgctggttctctcctcttggtgggtgggagacagggctttttctctccctctggtgaggactctcaggatgtagggacttggaaatatttactgtctgtccaccacggcctggaggagggaggttgtggttggatggaggagatgatcttgtctggaagtctagagtctttgttggttagaggactgcctgtgatcctggccactaggccaagaggccctatgaaggtggcgggaactcagcttcaacctcgatgtcttcagggtcttgtccagaatgtagatgggttccgtaa

SEQ ID NO: 58 - DNA, 1437 bp, homo sapien
aaatgctccagatcctcagtgttcaagaacctcaggaagcttcgcagtcctgcctcgtgcctgcttgaacagctggatgtgggcaggaggctgtgggagcgggccatgccagcagaatcccgccttactctggggacttactcttgtcacagcccctggtgtcctgagggtcatttcagtgtcatggaaccctactctggaaactgtcagtcccagggcactggggagggctgaggccgactatgcccagcctgctgctgctgttcacggctgctctgctgtccagctgggctcagcttctgacagacgccaactcctggtggtcattagctttgaacccggtgcagagacccgagatgtttatcatcggtgcccagcccgtgtgcagtcagcttcccgggctctcccctggccagaggaagctgtgccaattgtaccaggagcacatggcctacataggggagggagccaagactggcatcaaggaatgccagcaccagttccggcagcggcggtggaattgcagcacagcggacaacgcatctgtctttgggagagtcatgcagataggcagccgagagaccgccttcacccacgcggtgagcgccgcgggcgtggtcaacgccatcagccgggcctgccgcgagggcgagctctccacctgcggctgcagccggacggcgcggcccaaggacctgccccgggactggctgtggggcggctgtggggacaacgtggagtacggctaccgcttcgccaaggagtttgtggatgcccgggagcgagagaagaactttgccaaaggatcagaggagcagggccgggtgctcatgaacctgcaaaacaacgaggccggtcgcagggctgtgtataagatggcagacgtagcctgcaaatgccacggcgtctcggggtcctgcagcctcaagacctgctggctgcagctggccgagttccgcaaggtcggggaccggctgaaggagaagtacgacagcgcggccgccatgcgcgtcacccgcaagggccggctggagctggtcaacagccgcttcacccagcccaccccggaggacctggtctatgtggaccccagccccgactactgcctgcgcaacgagagcacgggctccctgggcacgcagggccgcctctgcaacaagacctcggagggcatggatggctgtgagctcatgtgctgcgggcgtggctacaaccagttcaagagcgtgcaggtggagcgctgccactgcaagttccactggtgctgcttcgtcaggtgtaagaagtgcacggagatcgtggaccagtacatctgtaaatagcccggagggcctgctcccggcccccctgcactctgcctcacaaaggtctatattatataaatctatataaatctattttatatttgtataagtaaatgggtgggtgctatacaat

SEQ ID NO: 59 - DNA, 2184 bp, homo sapien
tattcttccaaatggaaactgctaatttttgaagcagaaggttgacagcttcagtaagatctcaagagagcgagaagactggaatcagggaaccctactctggaaactgtcagtcccagggcactggggagggctgaggccgactatgcccagcctgctgctgctgttcacggctgctctgctgtccagctgggctcagcttctgacagacgccaactcctggtggtcattagctttgaacccggtgcagagacccgagatgtttatcatcggtgcccagcccgtgtgcagtcagcttcccgggctctcccctggccagaggaagctgtgccaattgtaccaggagcacatggcctacataggggagggagccaagactggcatcaaggaatgccagcaccagttccggcagcggcggtggaattgcagcacagcggacaacgcatctgtctttgggagagtcatgcagataggcagccgagagaccgccttcacccacgcggtgagcgccgcgggcgtggtcaacgccatcagccgggcctgccgcgagggcgagctctccacctgcggctgcagccggacggcgcggcccaaggacctgccccgggactggctgtggggcggctgtggggacaacgtggagtacggctaccgcttcgccaaggagtttgtggatgcccgggagcgagagaagaactttgccaaaggatcagaggagcagggccgggtgctcatgaacctgcaaaacaacgaggccggtcgcagggctgtgtataagatggcagacgtagcctgcaaatgccacggcgtctcggggtcctgcagcctcaagacctgctggctgcagctggccgagttccgcaaggtcggggaccggctgaaggagaagtacgacagcgcggccgccatgcgcgtcacccgcaagggccggctggagctggtcaacagccgcttcacccagcccaccccggaggacctggtctatgtggaccccagccccgactactgcctgcgcaacgagagcacgggctccctgggcacgcagggccgcctctgcaacaagacctcggagggcatggatggctgtgagctcatgtgctgcgggcgtggctacaaccagttcaagagcgtgcaggtggagcgctgccactgcaagttccactggtgctgcttcgtcaggtgtaagaagtgcacggagatcgtggaccagtacatctgtaaatagcccggagggcctgctcccggcccccctgcactctgcctcacaaaggtctatattatataaatctatataaatctattttatatttgtataagtaaatgggtgggtgctatacaatggaaagatgaaaatggaaaggaagagcttatttaagagacgctggagatctctgaggagtggactttgctggttctctcctcttggtgggtgggagacagggctttttctctccctctggcgaggactctcaggatgtagggacttggaaatatttactgtctgtccaccacggcctggaggagggaggttgtggttggatggaggagatgatcttgtctggaagtctagagtctttgttggttagaggactgcctgtgatcctggccactaggccaagaggccctatgaaggtggcgggaactcagcttcaacctcgatgtcttcagggtcttgtccagaatgtagatgggttccgtaagaggcctggtgctctcttactctttcatccacgtgcacttgtgcggcatctgcagtttacaggaacggctccttccctaaaatgagaagtccaaggtcatctctggcccagtgaccacagagagatctgcacctcccggacttcaggcctgcctttccagcgagaattcttcatcctccacggttcactagctcctacctgaagaggaaagggggccatttgacctgacatgtcaggaaagccctaaactgaatgtttgcgcctgggctgcagaagccagggtgcatgaccaggctgcgtggacgttatactgtcttcccccacccccggggaggggaagcttgagctgctgctgtcactcctccaccgagggaggcctcacaaaccacaggacgctgcaacgggtcaggctggcgggcccggcgtgctcatcatctctgccccaggtgtacggtttctctctgacattaaatgcccttcatgg

SEQ ID NO: 60 - DNA, 2238 bp, homo sapien
agtcacagccacagtgaccattagcaggcacccaggcctgtctttggctcggaaacggtggcccccaatgtagcctagtttgaacctaggaactgcaggaccagagagattccactggagcctgatggacgggtgacagagggaaccctactctggaaactgtcagtcccagggcactggggagggctgaggccgactatgcccagcctgctgctgctgttcacggctgctctgctgtccagctgggctcagcttctgacagacgccaactcctggtggtcattagctttgaacccggtgcagagacccgagatgtttatcatcggtgcccagcccgtgtgcagtcagcttcccgggctctcccctggccagaggaagctgtgccaattgtaccaggagcacatggcctacataggggagggagccaagactggcatcaaggaatgccagcaccagttccggcagcggcggtggaattgcagcacagcggacaacgcatctgtctttgggagagtcatgcagataggcagccgagagaccgccttcacccacgcggtgagcgccgcgggcgtggtcaacgccatcagccgggcctgccgcgagggcgagctctccacctgcggctgcagccggacggcgcggcccaaggacctgccccgggactggctgtggggcggctgtggggacaacgtggagtacggctaccgcttcgccaaggagtttgtggatgcccgggagcgagagaagaactttgccaaaggatcagaggagcagggccgggtgctcatgaacctgcaaaacaacgaggccggtcgcagggctgtgtataagatggcagacgtagcctgcaaatgccacggcgtctcggggtcctgcagcctcaagacctgctggctgcagctggccgagttccgcaaggtcggggaccggctgaaggagaagtacgacagcgcggccgccatgcgcgtcacccgcaagggccggctggagctggtcaacagccgcttcacccagcccaccccggaggacctggtctatgtggaccccagccccgactactgcctgcgcaacgagagcacgggctccctgggcacgcagggccgcctctgcaacaagacctcggagggcatggatggctgtgagctcatgtgctgcgggcgtggctacaaccagttcaagagcgtgcaggtggagcgctgccactgcaagttccactggtgctgcttcgtcaggtgtaagaagtgcacggagatcgtggaccagtacatctgtaaatagcccggagggcctgctcccggcccccctgcactctgcctcacaaaggtctatattatataaatctatataaatctattttatatttgtataagtaaatgggtgggtgctatacaatggaaagatgaaaatggaaaggaagagcttatttaagagacgctggagatctctgaggagtggactttgctggttctctcctcttggtgggtgggagacagggctttttctctccctctggcgaggactctcaggatgtagggacttggaaatatttactgtctgtccaccacggcctggaggagggaggttgtggttggatggaggagatgatcttgtctggaagtctagagtctttgttggttagaggactgcctgtgatcctggccactaggccaagaggccctatgaaggtggcgggaactcagcttcaacctcgatgtcttcagggtcttgtccagaatgtagatgggttccgtaagaggcctggtgctctcttactctttcatccacgtgcacttgtgcggcatctgcagtttacaggaacggctccttccctaaaatgagaagtccaaggtcatctctggcccagtgaccacagagagatctgcacctcccggacttcaggcctgcctttccagcgagaattcttcatcctccacggttcactagctcctacctgaagaggaaagggggccatttgacctgacatgtcaggaaagccctaaactgaatgtttgcgcctgggctgcagaagccagggtgcatgaccaggctgcgtggacgttatactgtcttcccccacccccggggaggggaagcttgagctgctgctgtcactcctccaccgagggaggcctcacaaaccacaggacgctgcaacgggtcaggctggcgggcccggcgtgctcatcatctctgccccaggtgtacggtttctctctgacattaaatgcccttcatgga

SEQ ID NO: 61 - DNA, 508 bp, homo sapien
actgtcagtcccagggcactggggagggctgaggccgactatgcccagcctgctgctgctgttcacggctgctctgctgtccagctgggctcagcttctgacagacgccaactcctggtggtcattagctttgaacccggtgcagagacccgagatgtttatcatcggtgcccagcccgtgtgcagtcagcttcccgggctctcccctggccagaggaagctgtgccaattgtaccaggagcacatggcctacataggggagggagccaagactggcatcaaggaatgccagcaccagttccggcagcggcggtggaattgcagcacagcggacaacgcatctgtctttgggagagtcatgcagataggctgtgtataagatggcagacgtagcctgcaaatgccacggcgtctcggggtcctgcagcctcaagacctgctggctgcagctggccgagttccgcaaggtcggggaccggctgaaggagaagtacgacagcgcggccgc

SEQ ID NO: 62 - DNA, 2190 bp, homo sapien
tattcttccaaatggaaactgctaatttttgaagcagaaggttgacagcttcagtaagatctcaagagagcgagaagactggaatcagggaaccctactctggaaactgtcagtcccagggcactggggagggctgaggccgactatgcccagcctgctgctgctgttcacggctgctctgctgtccagctgggctcagcttctgacagacgccaactcctggtggtctttagctttgaacccggtgcagagacccgagatgtttatcatcggtgcccagcccgtgtgcagtcagcttcccgggctctcccctggccagaggaagctgtgccaattgtaccaggagcacatggcctacataagggagggagccaagactggcatcaaggaatgccagcaccagtttccgcagcggcggtggaagtgcagcacagcggacaacgcatctgtctttgggagagtcatgcagataggcagccgagagaccgccttcacccacgcggtgagcgccgcgggcgtggtcaacgccatcagccgggcctgccgcgagggagagctctccacctgcggctgcagccggacggcgcggcccaaggacctgccccgggactggctgtggggcggctgtggggacaacgtggagtacggctaccgctttgccaaggagtttgtggatgcccgggagcgagagaagaactttgccaagggatcagaggagcagggccgggtgctcatgaacctgcaaaacaacgaggccggtcgcagggctgtgtataagatggcagacgtagcctgcaaatgtcacggagtctctcggtcatgcaggctcaagacctgctggctgcagctggccgagttccgcaaggtcggggaccggctgaaggagaagtacgacagcgcggccgccatgcgcgtcacccgcaagggccggctggagctggtcaacagccgcttcacccagcccaccccggaggacctggtctatgtggaccccagccccgactactgcctgcgcaacgagagcacgggctccctgggcacgcagggccgcctctgcaacaagacctcggagggcatggatggctgtgagctcatgtgctgcgggcgtggctacaaccagttcaagagcgtgcaggtggagcgctgccactgcaagttccactggtgctgcttcgtcaggtgtaagaagtgcacggagatcgtggaccagtacatctgtaaataaccggaggctgcttcccgggccccccttgcactctgcctcacaaaggtctatattatataaatctatattaaatctattttaatatttgttataagtaaatgggtgggtgctatacaatggaaagatggaaatggaaagggaagagcttatttaagagacgctggagatctctgaggagtggactttgctggttctctcctcttggtgggtgggagacagggctttttctctccctctggtgaggactctcaggatgtagggacttggaaatatttactgtctgtccaccacggcctggaggagggaggttgtggttggatggaggagatgatcttgtctggaagtctagagtctttgttggttagaggactgcctgtgatcctggccactagccaagaggccctatgaaggtggcgggaactcagcttcaacctcgatgtcttcagggtcttgtccagaatgtagatgggttccgtaagaggcctggtgctctcttactctttcatccacgtgcacttgtgcggcatctgcagtttacaggaacggctccttccctaaaatgagaagtccaaggtcatctctggcccagtgaccacagagagatctgcacctcccggacttcaggcctgcctttccagcgagaattcttcatcctccacggttcactagctcctacctgaagaggaaagggggccatttgacctgacatgtcaggaaagccctaaactgaatgtttgcgcctgggctgcagaagccagggtgcatgaccaggctgcgtggacgttatactgtcttcccccacccccggggaggggaagcttgagctgctgctgtcactcctccaccgagggaggcctcacaaaccacaggacgctgcaacgggtcaggctggcgggcccggcgtgctcatcatctctgccccaggtgtacggtttctctctgacatttaaatgcccttcatgggg

SEQ ID NO: 63 - DNA, 2252 bp, homo sapien
gaccattagcaggcacccaggcctgtctttggctcggaaacggtggcccccaatgtagcctagtttgaacctaggaactgcaggaccagagagattccactggagcctgatggacgggtgacagagggaaccctactctggaaactgtcagtcccagggcactggggagggctgaggccgactatgcccagcctgctgctgctgttcacggctgctctgctgtccagctgggctcagcttctgacagacgccaactcctggtggtcattagctttgaacccggtgcagagacccgagatgtttatcatcggtgcccagcccgtgtgcagtcagcttcccgggctctcccctggccagaggaagctgtgccaattgtaccaggagcacatggcctacataggggagggagccaagactggcatcaaggaatgccagcaccagttccggcagcggcggtggaattgcagcacagcggacaacgcatctgtctttgggagagtcatgcagataggcagccgagagaccgccttcacccacgcggtgagcgccgcgggcgtggtcaacgccatcagccgggcctgccgcgagggcgagctctccacctgcggctgcagccggacggcgcggcccaaggacctgccccgggactggctgtggggcggctgtggggacaacgtggagtacggctaccgcttcgccaaggagtttgtggatgcccgggagcgagagaagaactttgccaaaggatcagaggagcagggccgggtgctcatgaacctgcaaaacaacgaggccggtcgcagggctgtgtataagatggcagacgtagcctgcaaatgccacggcgtctcggggtcctgcagcctcaagacctgctggctgcagctggccgagttccgcaaggtcggggaccggctgaaggagaagtacgacagcgcggccgccatgcgcgtcacccgcaagggccggctggagctggtcaacagccgcttcacccagcccaccccggaggacctggtctatgtggaccccagccccgactactgcctgcgcaacgagagcacgggctccctgggcacgcagggccgcctctgcaacaagacctcggagggcatggatggctgtgagctcatgtgctgcgggcgtggctacaaccagttcaagagcgtgcaggtggagcgctgccactgcaagttccactggtgctgcttcgtcaggtgtaagaagtgcacggagatcgtggaccagtacatctgtaaatagcccggagggcctgctcccggccccccctgcactctgcctcacaaaggtctatattatataaatctatataaatctattttatatttgtataagtaaatgggtgggtgctatacaatggaaagatgaaaatggaaaggaagagcttatttaagagacgctggagatctctgaggagtggactttgctggttctctcctcttggtgggtgggagacagggctttttctctccctctggcgaggactctcaggatgtagggacttggaaatatttactgtctgtccaccacggcctggaggagggaggttgtggttggatggaggagatgatcttgtctggaagtctagagtctttgttggttagaggactgcctgtgatcctggccactaggccaagaggccctatgaaggtggcgggaactcagcttcaacctcgatgtcttcagggtcttgtccagaatgtagatgggttccgtaagaggcctggtgctctcttactctttcatccacgtgcacttgtgcggcatctgcagtttacaggaacggctccttccctaaaatgagaagtccaaggtcatctctggcccagtgaccacagagagatctgcacctcccggacttcaggcctgcctttccagcgagaattcttcatcctccacggttcactagctcctacctgaagaggaaagggggccatttgacctgacatgtcaggaaagccctaaactgaatgtttgcgcctgggctgcagaagccagggtgcatgaccaggctgcgtggacgttatactgtcttcccccacccccggggaggggaagcttgagctgctgctgtcactcctccaccgagggaggcctcacaaaccacaggacgctgcaacgggtcaggctggcgggcccggcgtgctcatcatctctgccccaggtgtacggtttctctctgacattaaatgcccttcatggaaaaaaaaaaaagaaaaaaaaaaaaaaaa

SEQ ID NO: 64 - DNA, 1304 bp, homo sapien
caattcaccaaaatgttttaatcctacaaaggagagcctgagggtcagagaaataagtctctgggctggaatgagaggtaggcacgtgggggagtggataggatgggccccatttctttggatgttctgcagcaaggacaggtatgctttacaacagccgaagtggcctcccggctgccgaacggaggaacgccgcaagctccgctcttgaaattacttgttttcatttctctttgtggtttctcagctcattatttctttggaaattaggtcctgtgcagggttcccacagtttggggtaagagacagaagtcctagggtgggaagatgagcagtgggaggcggaggctggaaagaggccgagcttctttgtggggaacacgcagcacgtaagcatcagtgcaactttctccgcctcaccccggctcctggtctgcccttatccgctgagtttccacactgactctccatttctgttttctccagggaaccctactctggaaactgtcagtcccagggcactggggagggctgaggccgactatgcccagcctgctgctgctgttcacggctgctctgctgtccagctgggctcagcttctgacagacgccaactcctggtggtcattagctttgaacccggtgcagagacccgagatgtttatcatcggtgcccagcccgtgtgcagtcagcttcccgggctctcccctggccagaggaagctgtgccaattgtaccaggagcacatggcctacataggggagggagccaagactggcatcaaggaatgccagcaccagttccggcagcggcggtggaattgcagcacagcggacaacgcatctgtctttgggagagtcatgcagataggcagccgagagaccgccttcacccacgcggtgagcgccgcgggcgtggtcaacgccatcagccgggcctgccgcgagggcgagctctccacctgcggctgcagccggacggcgcggcccaaggacctgccccgggactggctgtggggcggctgtggggacaacgtggagtacggctaccgcttcgccaaggagtttgtggatgcccgggagcgagagaagaactttgccaaaggatcagaggagcagggccgggtgctcatgaacctgcaaaacaacgaggccggtcgcagggctgtgtataagatggcagacgtagcctgcaaatgccacggcgtctcggggtcctgcagcctcaagacctgctggctgcagctggccgagttccgcaaggtcggggaccggctgaaggagaagtacgacagcgcggccgc

SEQ ID NO: 65 - DNA, 1437 bp, homo sapien
aaatgctccagatcctcagtgttcaagaacctcaggaagcttcgcagtcctgcctcgtgcctgcttgaacagctggatgtgggcaggaggctgtgggagcgggccatgccagcagaatcccgccttactctggggacttactcttgtcacagcccctggtgtcctgagggtcatttcagtgtcatggaaccctactctggaaactgtcagtcccagggcactggggagggctgaggccgaccatgcccagcctgctgctgctgttcacggctgctctgctgtccagctgggctcagcttctgacagacgccaactcctggtggtcattagctttgaacccggtgcagagacccgagatgtttatcatcggtgcccagcccgtgtgcagtcagcttcccgggctctcccctggccagaggaagctgtgccaattgtaccaggagcacatggcctacataggggagggagccaagactggcatcaaggaatgacagcaccagttccggcagcggcggtggaattgcagcacagcggacaacgcatctgtctttgggagagtcatgcagataggcagccgagagaccgccttcacccacgcggtgagcgccgcgggcgtggtcaacgccatcagccgggcctgccgcgagggcgagctctccacctgcggctgcagccggacggcgcggcccaaggacctgccccgggactggctgtggggcggctgtggggacaacgtggagtacggctaccgcttcgccaaggagtttgtggatgcccgggagcgagagaagaactttgccaaaggatcagaggagcagggccgggtgctcatgaacctgcaaaacaacgaggccggtcgcagggctgtgtataagatggcagacgtagcctgcaaatgccacggcgtctcggggtcctgcagcctcaagacctgctggctgcagctggccgagttccgcaaggtcggggaccggctgaaggagaagtacgacagcgcggccgccatgcgcgtcacccgcaagggccggctggagctggtcaacagccgcttcacccagcccaccccggaggacctggtctatgtggaccccagccccgactactgcctgcgcaacgagagcacgggctccctgggcacgcagggccgcctctgcaacaagacctcggagggcatggatggctgtgagctcatgtgctgcgggcgtggctacaaccagttcaagagcgtgcaggtggagcgctgccactgcaagttccactggtgctgcttcgtcaggtgtaagaagtgcacggagatcgtggaccagtacatctgtaaatagcccggagggcctgctcccggcccccctgcactctgcctcacaaaggtctatattatataaatctatataaatctattttatatttgtataagtaaatgggtgggtgctatacaat

SEQ ID NO: 66 - DNA, 2184 bp, homo sapien
tattcttccaaatggaaactgctaatttttgaagcagaaggttgacagcttcagtaagatctcaagagagcgagaagactggaatcagggaaccctactctggaaactgtcagtcccagggcactggggagggctgaggccgaccatgcccagcctgctgctgctgttcacggctgctctgctgtccagctgggctcagcttctgacagacgccaactcctggtggtcattagctttgaacccggtgcagagacccgagatgtttatcatcggtgcccagcccgtgtgcagtcagcttcccgggctctcccctggccagaggaagctgtgccaattgtaccaggagcacatggcctacataggggagggagccaagactggcatcaaggaatgacagcaccagttccggcagcggcggtggaattgcagcacagcggacaacgcatctgtctttgggagagtcatgcagataggcagccgagagaccgccttcacccacgcggtgagcgccgcgggcgtggtcaacgccatcagccgggcctgccgcgagggcgagctctccacctgcggctgcagccggacggcgcggcccaaggacctgccccgggactggctgtggggcggctgtggggacaacgtggagtacggctaccgcttcgccaaggagtttgtggatgcccgggagcgagagaagaactttgccaaaggatcagaggagcagggccgggtgctcatgaacctgcaaaacaacgaggccggtcgcagggctgtgtataagatggcagacgtagcctgcaaatgccacggcgtctcggggtcctgcagcctcaagacctgctggctgcagctggccgagttccgcaaggtcggggaccggctgaaggagaagtacgacagcgcggccgccatgcgcgtcacccgcaagggccggctggagctggtcaacagccgcttcacccagcccaccccggaggacctggtctatgtggaccccagccccgactactgcctgcgcaacgagagcacgggctccctgggcacgcagggccgcctctgcaacaagacctcggagggcatggatggctgtgagctcatgtgctgcgggcgtggctacaaccagttcaagagcgtgcaggtggagcgctgccactgcaagttccactggtgctgcttcgtcaggtgtaagaagtgcacggagatcgtggaccagtacatctgtaaatagcccggagggcctgctcccggcccccctgcactctgcctcacaaaggtctatattatataaatctatataaatctattttatatttgtataagtaaatgggtgggtgctatacaatggaaagatgaaaatggaaaggaagagcttatttaagagacgctggagatctctgaggagtggactttgctggttctctcctcttggtgggtgggagacagggctttttctctccctctggcgaggactctcaggatgtagggacttggaaatatttactgtctgtccaccacggcctggaggagggaggttgtggttggatggaggagatgatcttgtctggaagtctagagtctttgttggttagaggactgcctgtgatcctggccactaggccaagaggccctatgaaggtggcgggaactcagcttcaacctcgatgtcttcagggtcttgtccagaatgtagatgggttccgtaagaggcctggtgctctcttactctttcatccacgtgcacttgtgcggcatctgcagtttacaggaacggctccttccctaaaatgagaagtccaaggtcatctctggcccagtgaccacagagagatctgcacctcccggacttcaggcctgcctttccagcgagaattcttcatcctccacggttcactagctcctacctgaagaggaaagggggccatttgacctgacatgtcaggaaagccctaaactgaatgtttgcgcctgggctgcagaagccagggtgcatgaccaggctgcgtggacgttatactgtcttcccccacccccggggaggggaagcttgagctgctgctgtcactcctccaccgagggaggcctcacaaaccacaggacgctgcaacgggtcaggctggcgggcccggcgtgctcatcatctctgccccaggtgtacggtttctctctgacattaaatgcccttcatgg

SEQ ID NO: 67 - DNA, 2238 bp, homo sapien
agtcacagccacagtgaccattagcaggcacccaggcctgtctttggctcggaaacggtggcccccaatgtagcctagtttgaacctaggaactgcaggaccagagagattccactggagcctgatggacgggtgacagagggaaccctactctggaaactgtcagtcccagggcactggggagggctgaggccgaccatgcccagcctgctgctgctgttcacggctgctctgctgtccagctgggctcagcttctgacagacgccaactcctggtggtcattagctttgaacccggtgcagagacccgagatgtttatcatcggtgcccagcccgtgtgcagtcagcttcccgggctctcccctggccagaggaagctgtgccaattgtaccaggagcacatggcctacataggggagggagccaagactggcatcaaggaatgacagcaccagttccggcagcggcggtggaattgcagcacagcggacaacgcatctgtctttgggagagtcatgcagataggcagccgagagaccgccttcacccacgcggtgagcgccgcgggcgtggtcaacgccatcagccgggcctgccgcgagggcgagctctccacctgcggctgcagccggacggcgcggcccaaggacctgccccgggactggctgtggggcggctgtggggacaacgtggagtacggctaccgcttcgccaaggagtttgtggatgcccgggagcgagagaagaactttgccaaaggatcagaggagcagggccgggtgctcatgaacctgcaaaacaacgaggccggtcgcagggctgtgtataagatggcagacgtagcctgcaaatgccacggcgtctcggggtcctgcagcctcaagacctgctggctgcagctggccgagttccgcaaggtcggggaccggctgaaggagaagtacgacagcgcggccgccatgcgcgtcacccgcaagggccggctggagctggtcaacagccgcttcacccagcccaccccggaggacctggtctatgtggaccccagccccgactactgcctgcgcaacgagagcacgggctccctgggcacgcagggccgcctctgcaacaagacctcggagggcatggatggctgtgagctcatgtgctgcgggcgtggctacaaccagttcaagagcgtgcaggtggagcgctgccactgcaagttccactggtgctgcttcgtcaggtgtaagaagtgcacggagatcgtggaccagtacatctgtaaatagcccggagggcctgctcccggcccccctgcactctgcctcacaaaggtctatattatataaatctatataaatctattttatatttgtataagtaaatgggtgggtgctatacaatggaaagatgaaaatggaaaggaagagcttatttaagagacgctggagatctctgaggagtggactttgctggttctctcctcttggtgggtgggagacagggctttttctctccctctggcgaggactctcaggatgtagggacttggaaatatttactgtctgtccaccacggcctggaggagggaggttgtggttggatggaggagatgatcttgtctggaagtctagagtctttgttggttagaggactgcctgtgatcctggccactaggccaagaggccctatgaaggtggcgggaactcagcttcaacctcgatgtcttcagggtcttgtccagaatgtagatgggttccgtaagaggcctggtgctctcttactctttcatccacgtgcacttgtgcggcatctgcagtttacaggaacggctccttccctaaaatgagaagtccaaggtcatctctggcccagtgaccacagagagatctgcacctcccggacttcaggcctgcctttccagcgagaattcttcatcctccacggttcactagctcctacctgaagaggaaagggggccatttgacctgacatgtcaggaaagccctaaactgaatgtttgcgcctgggctgcagaagccagggtgcatgaccaggctgcgtggacgttatactgtcttcccccacccccggggaggggaagcttgagctgctgctgtcactcctccaccgagggaggcctcacaaaccacaggacgctgcaacgggtcaggctggcgggcccggcgtgctcatcatctctgccccaggtgtacggtttctctctgacattaaatgcccttcatgga

SEQ ID NO: 68 - DNA, 508 bp, homo sapien
actgtcagtcccagggcactggggagggctgaggccgaccatgcccagcctgctgctgctgttcacggctgctctgctgtccagctgggctcagcttctgacagacgccaactcctggtggtcattagctttgaacccggtgcagagacccgagatgtttatcatcggtgcccagcccgtgtgcagtcagcttcccgggctctcccctggccagaggaagctgtgccaattgtaccaggagcacatggcctacataggggagggagccaagactggcatcaaggaatgacagcaccagttccggcagcggcggtggaattgcagcacagcggacaacgcatctgtctttgggagagtcatgcagataggctgtgtataagatggcagacgtagcctgcaaatgccacggcgtctcggggtcctgcagcctcaagacctgctggctgcagctggccgagttccgcaaggtcggggaccggctgaaggagaagtacgacagcgcggccgc

SEQ ID NO: 69 - DNA, 2190 bp, homo sapien
tattcttccaaatggaaactgctaatttttgaagcagaaggttgacagcttcagtaagatctcaagagagcgagaagactggaatcagggaaccctactctggaaactgtcagtcccagggcactggggagggctgaggccgaccatgcccagcctgctgctgctgttcacggctgctctgctgtccagctgggctcagcttctgacagacgccaactcctggtggtctttagctttgaacccggtgcagagacccgagatgtttatcatcggtgcccagcccgtgtgcagtcagcttcccgggctctcccctggccagaggaagctgtgccaattgtaccaggagcacatggcctacataagggagggagccaagactggcatcaaggaatgacagcaccagtttccgcagcggcggtggaagtgcagcacagcggacaacgcatctgtctttgggagagtcatgcagataggcagccgagagaccgccttcacccacgcggtgagcgccgcgggcgtggtcaacgccatcagccgggcctgccgcgagggagagctctccacctgcggctgcagccggacggcgcggcccaaggacctgccccgggactggctgtggggcggctgtggggacaacgtggagtacggctaccgctttgccaaggagtttgtggatgcccgggagcgagagaagaactttgccaagggatcagaggagcagggccgggtgctcatgaacctgcaaaacaacgaggccggtcgcagggctgtgtataagatggcagacgtagcctgcaaatgtcacggagtctctcggtcatgcaggctcaagacctgctggctgcagctggccgagttccgcaaggtcggggaccggctgaaggagaagtacgacagcgcggccgccatgcgcgtcacccgcaagggccggctggagctggtcaacagccgcttcacccagcccaccccggaggacctggtctatgtggaccccagccccgactactgcctgcgcaacgagagcacgggctccctgggcacgcagggccgcctctgcaacaagacctcggagggcatggatggctgtgagctcatgtgctgcgggcgtggctacaaccagttcaagagcgtgcaggtggagcgctgccactgcaagttccactggtgctgcttcgtcaggtgtaagaagtgcacggagatcgtggaccagtacatctgtaaataaccggaggctgcttcccgggccccccttgcactctgcctcacaaaggtctatattatataaatctatattaaatctattttaatatttgttataagtaaatgggtgggtgctatacaatggaaagatggaaatggaaagggaagagcttatttaagagacgctggagatctctgaggagtggactttgctggttctctcctcttggtgggtgggagacagggctttttctctccctctggtgaggactctcaggatgtagggacttggaaatatttactgtctgtccaccacggcctggaggagggaggttgtggttggatggaggagatgatcttgtctggaagtctagagtctttgttggttagaggactgcctgtgatcctggccactagccaagaggccctatgaaggtggcgggaactcagcttcaacctcgatgtcttcagggtcttgtccagaatgtagatgggttccgtaagaggcctggtgctctcttactctttcatccacgtgcacttgtgcggcatctgcagtttacaggaacggctccttccctaaaatgagaagtccaaggtcatctctggcccagtgaccacagagagatctgcacctcccggacttcaggcctgcctttccagcgagaattcttcatcctccacggttcactagctcctacctgaagaggaaagggggccatttgacctgacatgtcaggaaagccctaaactgaatgtttgcgcctgggctgcagaagccagggtgcatgaccaggctgcgtggacgttatactgtcttcccccacccccggggaggggaagcttgagctgctgctgtcactcctccaccgagggaggcctcacaaaccacaggacgctgcaacgggtcaggctggcgggcccggcgtgctcatcatctctgccccaggtgtacggtttctctctgacatttaaatgcccttcatgggg

SEQ ID NO: 70 - DNA, 2252 bp, homo sapien
gaccattagcaggcacccaggcctgtctttggctcggaaacggtggcccccaatgtagcctagtttgaacctaggaactgcaggaccagagagattccactggagcctgatggacgggtgacagagggaaccctactctggaaactgtcagtcccagggcactggggagggctgaggccgaccatgcccagcctgctgctgctgttcacggctgctctgctgtccagctgggctcagcttctgacagacgccaactcctggtggtcattagctttgaacccggtgcagagacccgagatgtttatcatcggtgcccagcccgtgtgcagtcagcttcccgggctctcccctggccagaggaagctgtgccaattgtaccaggagcacatggcctacataggggagggagccaagactggcatcaaggaatgacagcaccagttccggcagcggcggtggaattgcagcacagcggacaacgcatctgtctttgggagagtcatgcagataggcagccgagagaccgccttcacccacgcggtgagcgccgcgggcgtggtcaacgccatcagccgggcctgccgcgagggcgagctctccacctgcggctgcagccggacggcgcggcccaaggacctgccccgggactggctgtggggcggctgtggggacaacgtggagtacggctaccgcttcgccaaggagtttgtggatgcccgggagcgagagaagaactttgccaaaggatcagaggagcagggccgggtgctcatgaacctgcaaaacaacgaggccggtcgcagggctgtgtataagatggcagacgtagcctgcaaatgccacggcgtctcggggtcctgcagcctcaagacctgctggctgcagctggccgagttccgcaaggtcggggaccggctgaaggagaagtacgacagcgcggccgccatgcgcgtcacccgcaagggccggctggagctggtcaacagccgcttcacccagcccaccccggaggacctggtctatgtggaccccagccccgactactgcctgcgcaacgagagcacgggctccctgggcacgcagggccgcctctgcaacaagacctcggagggcatggatggctgtgagctcatgtgctgcgggcgtggctacaaccagttcaagagcgtgcaggtggagcgctgccactgcaagttccactggtgctgcttcgtcaggtgtaagaagtgcacggagatcgtggaccagtacatctgtaaatagcccggagggcctgctcccggccccccctgcactctgcctcacaaaggtctatattatataaatctatataaatctattttatatttgtataagtaaatgggtgggtgctatacaatggaaagatgaaaatggaaaggaagagcttatttaagagacgctggagatctctgaggagtggactttgctggttctctcctcttggtgggtgggagacagggctttttctctccctctggcgaggactctcaggatgtagggacttggaaatatttactgtctgtccaccacggcctggaggagggaggttgtggttggatggaggagatgatcttgtctggaagtctagagtctttgttggttagaggactgcctgtgatcctggccactaggccaagaggccctatgaaggtggcgggaactcagcttcaacctcgatgtcttcagggtcttgtccagaatgtagatgggttccgtaagaggcctggtgctctcttactctttcatccacgtgcacttgtgcggcatctgcagtttacaggaacggctccttccctaaaatgagaagtccaaggtcatctctggcccagtgaccacagagagatctgcacctcccggacttcaggcctgcctttccagcgagaattcttcatcctccacggttcactagctcctacctgaagaggaaagggggccatttgacctgacatgtcaggaaagccctaaactgaatgtttgcgcctgggctgcagaagccagggtgcatgaccaggctgcgtggacgttatactgtcttcccccacccccggggaggggaagcttgagctgctgctgtcactcctccaccgagggaggcctcacaaaccacaggacgctgcaacgggtcaggctggcgggcccggcgtgctcatcatctctgccccaggtgtacggtttctctctgacattaaatgcccttcatggaaaaaaaaaaaagaaaaaaaaaaaaaaaa

SEQ ID NO: 71 - DNA, 1304 bp, homo sapien
caattcaccaaaatgttttaatcctacaaaggagagcctgagggtcagagaaataagtctctgggctggaatgagaggtaggcacgtgggggagtggataggatgggccccatttctttggatgttctgcagcaaggacaggtatgctttacaacagccgaagtggcctcccggctgccgaacggaggaacgccgcaagctccgctcttgaaattacttgttttcatttctctttgtggtttctcagctcattatttctttggaaattaggtcctgtgcagggttcccacagtttggggtaagagacagaagtcctagggtgggaagatgagcagtgggaggcggaggctggaaagaggccgagcttctttgtggggaacacgcagcacgtaagcatcagtgcaactttctccgcctcaccccggctcctggtctgcccttatccgctgagtttccacactgactctccatttctgttttctccagggaaccctactctggaaactgtcagtcccagggcactggggagggctgaggccgaccatgcccagcctgctgctgctgttcacggctgctctgctgtccagctgggctcagcttctgacagacgccaactcctggtggtcattagctttgaacccggtgcagagacccgagatgtttatcatcggtgcccagcccgtgtgcagtcagcttcccgggctctcccctggccagaggaagctgtgccaattgtaccaggagcacatggcctacataggggagggagccaagactggcatcaaggaatgacagcaccagttccggcagcggcggtggaattgcagcacagcggacaacgcatctgtctttgggagagtcatgcagataggcagccgagagaccgccttcacccacgcggtgagcgccgcgggcgtggtcaacgccatcagccgggcctgccgcgagggcgagctctccacctgcggctgcagccggacggcgcggcccaaggacctgccccgggactggctgtggggcggctgtggggacaacgtggagtacggctaccgcttcgccaaggagtttgtggatgcccgggagcgagagaagaactttgccaaaggatcagaggagcagggccgggtgctcatgaacctgcaaaacaacgaggccggtcgcagggctgtgtataagatggcagacgtagcctgcaaatgccacggcgtctcggggtcctgcagcctcaagacctgctggctgcagctggccgagttccgcaaggtcggggaccggctgaaggagaagtacgacagcgcggccgc

SEQ ID NO: 72 - DNA, 1559 bp, homo sapien
cgaccatgcccagcctgctgctgctgttcacggctgctctgctgtccagctgggctcagcttctgacagacgccaactcctggtggtcattagctttgaacccggtgcagagacccgagatgtttatcatcggtgcccagcccgtgtgcagtcagcttcccgggctctcccctggccagaggaagctgtgccaattgtaccaggagcacatggcctacataggggagggagccaagactggcatcaaggaatgaagcaccagttccggcagcggcggtggaattgcagcacagcggacaacgcatctgtctttgggagagtcatgcagataggcagccgagagaccgccttcacccacgcggtgagcgccgcgggcgtggtcaacgccatcagccgggcctgccgcgagggcgagctctccacctgcggctgcagccggacggcgcggcccaaggacctgccccgggactggctgtggggcggctgtggggacaacgtggagtacggctaccgcttcgccaaggagtttgtggatgcccgggagcgagagaagaactttgccaaaggatcagaggagcagggccgggtgctcatgaacctgcaaaacaacgaggccggtcgcagggctgtgtataagatggcagacgtagcctgcaaatgccacggcgtctcggggtcctgcagcctcaagacctgctggctgcagctggccgagttccgcaaggtcggggaccggctgaaggagaagtacgacagcgcggccgccatgcgcgtcacccgcaagggccggctggagctggtcaacagccgcttcacccagcccaccccggaggacctggtctatgtggaccccagccccgactactgcctgcgcaacgagagcacgggctccctgggcacgcagggccgcctctgcaacaagacctcggagggcatggatggctgtgagctcatgtgctgcgggcgtggctacaaccagttcaagagcgtgcaggtggagcgctgccactgcaagttccactggtgctgcttcgtcaggtgtaagaagtgcacggagatcgtggaccagtacatctgtaaatagcccggagggcctgctcccggcccccctgcactctgcctcacaaaggtctatattatataaatctatataaatctattttatatttgtataagtaaatgggtgggtgctatacaatggaaagatgaaaatggaaaggaagagcttatttaagagacgctggagatctctgaggagtggactttgctggttctctcctcttggtgggtgggagacagggctttttctctccctctggtgaggactctcaggatgtagggacttggaaatatttactgtctgtccaccacggcctggaggagggaggttgtggttggatggaggagatgatcttgtctggaagtctagagtctttgttggttagaggactgcctgtgatcctggccactaggccaagaggccctatgaaggtggcgggaactcagcttcaacctcgatgtcttcagggtcttgtccagaatgtagatgggttccgtaa

SEQ ID NO: 73 - DNA, 1437 bp, homo sapien
aaatgctccagatcctcagtgttcaagaacctcaggaagcttcgcagtcctgcctcgtgcctgcttgaacagctggatgtgggcaggaggctgtgggagcgggccatgccagcagaatcccgccttactctggggacttactcttgtcacagcccctggtgtcctgagggtcatttcagtgtcatggaaccctactctggaaactgtcagtcccagggcactggggagggctgaggccgaccatgcccagcctgctgctgctgttcacggctgctctgctgtccagctgggctcagcttctgacagacgccaactcctggtggtcattagctttgaacccggtgcagagacccgagatgtttatcatcggtgcccagcccgtgtgcagtcagcttcccgggctctcccctggccagaggaagctgtgccaattgtaccaggagcacatggcctacataggggagggagccaagactggcatcaaggaatgccagcaccagttccggcagcggcggtggaattgcagcacagcggacaacgcatctgtctttgggagagtcatgcagataggcagccgagagaccgccttcacccacgcggtgagcgccgcgggcgtggtcaacgccatcagccgggcctgctgcgagggcgagctctccacctgcggctgcagccggacggcgcggcccaaggacctgccccgggactggctgtggggcggctgtggggacaacgtggagtacggctaccgcttcgccaaggagtttgtggatgcccgggagcgagagaagaactttgccaaaggatcagaggagcagggccgggtgctcatgaacctgcaaaacaacgaggccggtcgcagggctgtgtataagatggcagacgtagcctgcaaatgccacggcgtctcggggtcctgcagcctcaagacctgctggctgcagctggccgagttccgcaaggtcggggaccggctgaaggagaagtacgacagcgcggccgccatgcgcgtcacccgcaagggccggctggagctggtcaacagccgcttcacccagcccaccccggaggacctggtctatgtggaccccagccccgactactgcctgcgcaacgagagcacgggctccctgggcacgcagggccgcctctgcaacaagacctcggagggcatggatggctgtgagctcatgtgctgcgggcgtggctacaaccagttcaagagcgtgcaggtggagcgctgccactgcaagttccactggtgctgcttcgtcaggtgtaagaagtgcacggagatcgtggaccagtacatctgtaaatagcccggagggcctgctcccggcccccctgcactctgcctcacaaaggtctatattatataaatctatataaatctattttatatttgtataagtaaatgggtgggtgctatacaat

SEQ ID NO: 74 - DNA, 2184 bp, homo sapien
tattcttccaaatggaaactgctaatttttgaagcagaaggttgacagcttcagtaagatctcaagagagcgagaagactggaatcagggaaccctactctggaaactgtcagtcccagggcactggggagggctgaggccgaccatgcccagcctgctgctgctgttcacggctgctctgctgtccagctgggctcagcttctgacagacgccaactcctggtggtcattagctttgaacccggtgcagagacccgagatgtttatcatcggtgcccagcccgtgtgcagtcagcttcccgggctctcccctggccagaggaagctgtgccaattgtaccaggagcacatggcctacataggggagggagccaagactggcatcaaggaatgccagcaccagttccggcagcggcggtggaattgcagcacagcggacaacgcatctgtctttgggagagtcatgcagataggcagccgagagaccgccttcacccacgcggtgagcgccgcgggcgtggtcaacgccatcagccgggcctgctgcgagggcgagctctccacctgcggctgcagccggacggcgcggcccaaggacctgccccgggactggctgtggggcggctgtggggacaacgtggagtacggctaccgcttcgccaaggagtttgtggatgcccgggagcgagagaagaactttgccaaaggatcagaggagcagggccgggtgctcatgaacctgcaaaacaacgaggccggtcgcagggctgtgtataagatggcagacgtagcctgcaaatgccacggcgtctcggggtcctgcagcctcaagacctgctggctgcagctggccgagttccgcaaggtcggggaccggctgaaggagaagtacgacagcgcggccgccatgcgcgtcacccgcaagggccggctggagctggtcaacagccgcttcacccagcccaccccggaggacctggtctatgtggaccccagccccgactactgcctgcgcaacgagagcacgggctccctgggcacgcagggccgcctctgcaacaagacctcggagggcatggatggctgtgagctcatgtgctgcgggcgtggctacaaccagttcaagagcgtgcaggtggagcgctgccactgcaagttccactggtgctgcttcgtcaggtgtaagaagtgcacggagatcgtggaccagtacatctgtaaatagcccggagggcctgctcccggcccccctgcactctgcctcacaaaggtctatattatataaatctatataaatctattttatatttgtataagtaaatgggtgggtgctatacaatggaaagatgaaaatggaaaggaagagcttatttaagagacgctggagatctctgaggagtggactttgctggttctctcctcttggtgggtgggagacagggctttttctctccctctggcgaggactctcaggatgtagggacttggaaatatttactgtctgtccaccacggcctggaggagggaggttgtggttggatggaggagatgatcttgtctggaagtctagagtctttgttggttagaggactgcctgtgatcctggccactaggccaagaggccctatgaaggtggcgggaactcagcttcaacctcgatgtcttcagggtcttgtccagaatgtagatgggttccgtaagaggcctggtgctctcttactctttcatccacgtgcacttgtgcggcatctgcagtttacaggaacggctccttccctaaaatgagaagtccaaggtcatctctggcccagtgaccacagagagatctgcacctcccggacttcaggcctgcctttccagcgagaattcttcatcctccacggttcactagctcctacctgaagaggaaagggggccatttgacctgacatgtcaggaaagccctaaactgaatgtttgcgcctgggctgcagaagccagggtgcatgaccaggctgcgtggacgttatactgtcttcccccacccccggggaggggaagcttgagctgctgctgtcactcctccaccgagggaggcctcacaaaccacaggacgctgcaacgggtcaggctggcgggcccggcgtgctcatcatctctgccccaggtgtacggtttctctctgacattaaatgcccttcatgg

SEQ ID NO: 75 - DNA, 2238 bp, homo sapien
agtcacagccacagtgaccattagcaggcacccaggcctgtctttggctcggaaacggtggcccccaatgtagcctagtttgaacctaggaactgcaggaccagagagattccactggagcctgatggacgggtgacagagggaaccctactctggaaactgtcagtcccagggcactggggagggctgaggccgaccatgcccagcctgctgctgctgttcacggctgctctgctgtccagctgggctcagcttctgacagacgccaactcctggtggtcattagctttgaacccggtgcagagacccgagatgtttatcatcggtgcccagcccgtgtgcagtcagcttcccgggctctcccctggccagaggaagctgtgccaattgtaccaggagcacatggcctacataggggagggagccaagactggcatcaaggaatgccagcaccagttccggcagcggcggtggaattgcagcacagcggacaacgcatctgtctttgggagagtcatgcagataggcagccgagagaccgccttcacccacgcggtgagcgccgcgggcgtggtcaacgccatcagccgggcctgctgcgagggcgagctctccacctgcggctgcagccggacggcgcggcccaaggacctgccccgggactggctgtggggcggctgtggggacaacgtggagtacggctaccgcttcgccaaggagtttgtggatgcccgggagcgagagaagaactttgccaaaggatcagaggagcagggccgggtgctcatgaacctgcaaaacaacgaggccggtcgcagggctgtgtataagatggcagacgtagcctgcaaatgccacggcgtctcggggtcctgcagcctcaagacctgctggctgcagctggccgagttccgcaaggtcggggaccggctgaaggagaagtacgacagcgcggccgccatgcgcgtcacccgcaagggccggctggagctggtcaacagccgcttcacccagcccaccccggaggacctggtctatgtggaccccagccccgactactgcctgcgcaacgagagcacgggctccctgggcacgcagggccgcctctgcaacaagacctcggagggcatggatggctgtgagctcatgtgctgcgggcgtggctacaaccagttcaagagcgtgcaggtggagcgctgccactgcaagttccactggtgctgcttcgtcaggtgtaagaagtgcacggagatcgtggaccagtacatctgtaaatagcccggagggcctgctcccggcccccctgcactctgcctcacaaaggtctatattatataaatctatataaatctattttatatttgtataagtaaatgggtgggtgctatacaatggaaagatgaaaatggaaaggaagagcttatttaagagacgctggagatctctgaggagtggactttgctggttctctcctcttggtgggtgggagacagggctttttctctccctctggcgaggactctcaggatgtagggacttggaaatatttactgtctgtccaccacggcctggaggagggaggttgtggttggatggaggagatgatcttgtctggaagtctagagtctttgttggttagaggactgcctgtgatcctggccactaggccaagaggccctatgaaggtggcgggaactcagcttcaacctcgatgtcttcagggtcttgtccagaatgtagatgggttccgtaagaggcctggtgctctcttactctttcatccacgtgcacttgtgcggcatctgcagtttacaggaacggctccttccctaaaatgagaagtccaaggtcatctctggcccagtgaccacagagagatctgcacctcccggacttcaggcctgcctttccagcgagaattcttcatcctccacggttcactagctcctacctgaagaggaaagggggccatttgacctgacatgtcaggaaagccctaaactgaatgtttgcgcctgggctgcagaagccagggtgcatgaccaggctgcgtggacgttatactgtcttcccccacccccggggaggggaagcttgagctgctgctgtcactcctccaccgagggaggcctcacaaaccacaggacgctgcaacgggtcaggctggcgggcccggcgtgctcatcatctctgccccaggtgtacggtttctctctgacattaaatgcccttcatgga

SEQ ID NO: 76 - DNA, 2190 bp, homo sapien
tattcttccaaatggaaactgctaatttttgaagcagaaggttgacagcttcagtaagatctcaagagagcgagaagactggaatcagggaaccctactctggaaactgtcagtcccagggcactggggagggctgaggccgaccatgcccagcctgctgctgctgttcacggctgctctgctgtccagctgggctcagcttctgacagacgccaactcctggtggtctttagctttgaacccggtgcagagacccgagatgtttatcatcggtgcccagcccgtgtgcagtcagcttcccgggctctcccctggccagaggaagctgtgccaattgtaccaggagcacatggcctacataagggagggagccaagactggcatcaaggaatgccagcaccagtttccgcagcggcggtggaagtgcagcacagcggacaacgcatctgtctttgggagagtcatgcagataggcagccgagagaccgccttcacccacgcggtgagcgccgcgggcgtggtcaacgccatcagccgggcctgctgcgagggagagctctccacctgcggctgcagccggacggcgcggcccaaggacctgccccgggactggctgtggggcggctgtggggacaacgtggagtacggctaccgctttgccaaggagtttgtggatgcccgggagcgagagaagaactttgccaagggatcagaggagcagggccgggtgctcatgaacctgcaaaacaacgaggccggtcgcagggctgtgtataagatggcagacgtagcctgcaaatgtcacggagtctctcggtcatgcaggctcaagacctgctggctgcagctggccgagttccgcaaggtcggggaccggctgaaggagaagtacgacagcgcggccgccatgcgcgtcacccgcaagggccggctggagctggtcaacagccgcttcacccagcccaccccggaggacctggtctatgtggaccccagccccgactactgcctgcgcaacgagagcacgggctccctgggcacgcagggccgcctctgcaacaagacctcggagggcatggatggctgtgagctcatgtgctgcgggcgtggctacaaccagttcaagagcgtgcaggtggagcgctgccactgcaagttccactggtgctgcttcgtcaggtgtaagaagtgcacggagatcgtggaccagtacatctgtaaataaccggaggctgcttcccgggccccccttgcactctgcctcacaaaggtctatattatataaatctatattaaatctattttaatatttgttataagtaaatgggtgggtgctatacaatggaaagatggaaatggaaagggaagagcttatttaagagacgctggagatctctgaggagtggactttgctggttctctcctcttggtgggtgggagacagggctttttctctccctctggtgaggactctcaggatgtagggacttggaaatatttactgtctgtccaccacggcctggaggagggaggttgtggttggatggaggagatgatcttgtctggaagtctagagtctttgttggttagaggactgcctgtgatcctggccactagccaagaggccctatgaaggtggcgggaactcagcttcaacctcgatgtcttcagggtcttgtccagaatgtagatgggttccgtaagaggcctggtgctctcttactctttcatccacgtgcacttgtgcggcatctgcagtttacaggaacggctccttccctaaaatgagaagtccaaggtcatctctggcccagtgaccacagagagatctgcacctcccggacttcaggcctgcctttccagcgagaattcttcatcctccacggttcactagctcctacctgaagaggaaagggggccatttgacctgacatgtcaggaaagccctaaactgaatgtttgcgcctgggctgcagaagccagggtgcatgaccaggctgcgtggacgttatactgtcttcccccacccccggggaggggaagcttgagctgctgctgtcactcctccaccgagggaggcctcacaaaccacaggacgctgcaacgggtcaggctggcgggcccggcgtgctcatcatctctgccccaggtgtacggtttctctctgacatttaaatgcccttcatgggg

SEQ ID NO: 77 - DNA, 2252 bp, homo sapien
gaccattagcaggcacccaggcctgtctttggctcggaaacggtggcccccaatgtagcctagtttgaacctaggaactgcaggaccagagagattccactggagcctgatggacgggtgacagagggaaccctactctggaaactgtcagtcccagggcactggggagggctgaggccgaccatgcccagcctgctgctgctgttcacggctgctctgctgtccagctgggctcagcttctgacagacgccaactcctggtggtcattagctttgaacccggtgcagagacccgagatgtttatcatcggtgcccagcccgtgtgcagtcagcttcccgggctctcccctggccagaggaagctgtgccaattgtaccaggagcacatggcctacataggggagggagccaagactggcatcaaggaatgccagcaccagttccggcagcggcggtggaattgcagcacagcggacaacgcatctgtctttgggagagtcatgcagataggcagccgagagaccgccttcacccacgcggtgagcgccgcgggcgtggtcaacgccatcagccgggcctgctgcgagggcgagctctccacctgcggctgcagccggacggcgcggcccaaggacctgccccgggactggctgtggggcggctgtggggacaacgtggagtacggctaccgcttcgccaaggagtttgtggatgcccgggagcgagagaagaactttgccaaaggatcagaggagcagggccgggtgctcatgaacctgcaaaacaacgaggccggtcgcagggctgtgtataagatggcagacgtagcctgcaaatgccacggcgtctcggggtcctgcagcctcaagacctgctggctgcagctggccgagttccgcaaggtcggggaccggctgaaggagaagtacgacagcgcggccgccatgcgcgtcacccgcaagggccggctggagctggtcaacagccgcttcacccagcccaccccggaggacctggtctatgtggaccccagccccgactactgcctgcgcaacgagagcacgggctccctgggcacgcagggccgcctctgcaacaagacctcggagggcatggatggctgtgagctcatgtgctgcgggcgtggctacaaccagttcaagagcgtgcaggtggagcgctgccactgcaagttccactggtgctgcttcgtcaggtgtaagaagtgcacggagatcgtggaccagtacatctgtaaatagcccggagggcctgctcccggccccccctgcactctgcctcacaaaggtctatattatataaatctatataaatctattttatatttgtataagtaaatgggtgggtgctatacaatggaaagatgaaaatggaaaggaagagcttatttaagagacgctggagatctctgaggagtggactttgctggttctctcctcttggtgggtgggagacagggctttttctctccctctggcgaggactctcaggatgtagggacttggaaatatttactgtctgtccaccacggcctggaggagggaggttgtggttggatggaggagatgatcttgtctggaagtctagagtctttgttggttagaggactgcctgtgatcctggccactaggccaagaggccctatgaaggtggcgggaactcagcttcaacctcgatgtcttcagggtcttgtccagaatgtagatgggttccgtaagaggcctggtgctctcttactctttcatccacgtgcacttgtgcggcatctgcagtttacaggaacggctccttccctaaaatgagaagtccaaggtcatctctggcccagtgaccacagagagatctgcacctcccggacttcaggcctgcctttccagcgagaattcttcatcctccacggttcactagctcctacctgaagaggaaagggggccatttgacctgacatgtcaggaaagccctaaactgaatgtttgcgcctgggctgcagaagccagggtgcatgaccaggctgcgtggacgttatactgtcttcccccacccccggggaggggaagcttgagctgctgctgtcactcctccaccgagggaggcctcacaaaccacaggacgctgcaacgggtcaggctggcgggcccggcgtgctcatcatctctgccccaggtgtacggtttctctctgacattaaatgcccttcatggaaaaaaaaaaaagaaaaaaaaaaaaaaaa

SEQ ID NO: 78 - DNA, 1304 bp, homo sapien
caattcaccaaaatgttttaatcctacaaaggagagcctgagggtcagagaaataagtctctgggctggaatgagaggtaggcacgtgggggagtggataggatgggccccatttctttggatgttctgcagcaaggacaggtatgctttacaacagccgaagtggcctcccggctgccgaacggaggaacgccgcaagctccgctcttgaaattacttgttttcatttctctttgtggtttctcagctcattatttctttggaaattaggtcctgtgcagggttcccacagtttggggtaagagacagaagtcctagggtgggaagatgagcagtgggaggcggaggctggaaagaggccgagcttctttgtggggaacacgcagcacgtaagcatcagtgcaactttctccgcctcaccccggctcctggtctgcccttatccgctgagtttccacactgactctccatttctgttttctccagggaaccctactctggaaactgtcagtcccagggcactggggagggctgaggccgaccatgcccagcctgctgctgctgttcacggctgctctgctgtccagctgggctcagcttctgacagacgccaactcctggtggtcattagctttgaacccggtgcagagacccgagatgtttatcatcggtgcccagcccgtgtgcagtcagcttcccgggctctcccctggccagaggaagctgtgccaattgtaccaggagcacatggcctacataggggagggagccaagactggcatcaaggaatgccagcaccagttccggcagcggcggtggaattgcagcacagcggacaacgcatctgtctttgggagagtcatgcagataggcagccgagagaccgccttcacccacgcggtgagcgccgcgggcgtggtcaacgccatcagccgggcctgctgcgagggcgagctctccacctgcggctgcagccggacggcgcggcccaaggacctgccccgggactggctgtggggcggctgtggggacaacgtggagtacggctaccgcttcgccaaggagtttgtggatgcccgggagcgagagaagaactttgccaaaggatcagaggagcagggccgggtgctcatgaacctgcaaaacaacgaggccggtcgcagggctgtgtataagatggcagacgtagcctgcaaatgccacggcgtctcggggtcctgcagcctcaagacctgctggctgcagctggccgagttccgcaaggtcggggaccggctgaaggagaagtacgacagcgcggccgc

SEQ ID NO: 79 - DNA, 1560 bp, homo sapien
cgaccatgcccagcctgctgctgctgttcacggctgctctgctgtccagctgggctcagcttctgacagacgccaactcctggtggtcattagctttgaacccggtgcagagacccgagatgtttatcatcggtgcccagcccgtgtgcagtcagcttcccgggctctcccctggccagaggaagctgtgccaattgtaccaggagcacatggcctacataggggagggagccaagactggcatcaaggaatgccagcaccagttccggcagcggcggtggaattgcagcacagcggacaacgcatctgtctttgggagagtcatgcagataggcagccgagagaccgccttcacccacgcggtgagcgccgcgggcgtggtcaacgccatcagccgggcctgctgcgagggcgagctctccacctgcggctgcagccggacggcgcggcccaaggacctgccccgggactggctgtggggcggctgtggggacaacgtggagtacggctaccgcttcgccaaggagtttgtggatgcccgggagcgagagaagaactttgccaaaggatcagaggagcagggccgggtgctcatgaacctgcaaaacaacgaggccggtcgcagggctgtgtataagatggcagacgtagcctgcaaatgccacggcgtctcggggtcctgcagcctcaagacctgctggctgcagctggccgagttccgcaaggtcggggaccggctgaaggagaagtacgacagcgcggccgccatgcgcgtcacccgcaagggccggctggagctggtcaacagccgcttcacccagcccaccccggaggacctggtctatgtggaccccagccccgactactgcctgcgcaacgagagcacgggctccctgggcacgcagggccgcctctgcaacaagacctcggagggcatggatggctgtgagctcatgtgctgcgggcgtggctacaaccagttcaagagcgtgcaggtggagcgctgccactgcaagttccactggtgctgcttcgtcaggtgtaagaagtgcacggagatcgtggaccagtacatctgtaaatagcccggagggcctgctcccggcccccctgcactctgcctcacaaaggtctatattatataaatctatataaatctattttatatttgtataagtaaatgggtgggtgctatacaatggaaagatgaaaatggaaaggaagagcttatttaagagacgctggagatctctgaggagtggactttgctggttctctcctcttggtgggtgggagacagggctttttctctccctctggtgaggactctcaggatgtagggacttggaaatatttactgtctgtccaccacggcctggaggagggaggttgtggttggatggaggagatgatcttgtctggaagtctagagtctttgttggttagaggactgcctgtgatcctggccactaggccaagaggccctatgaaggtggcgggaactcagcttcaacctcgatgtcttcagggtcttgtccagaatgtagatgggttccgtaa

SEQ ID NO: 80 - DNA, 1437 bp, homo sapien
aaatgctccagatcctcagtgttcaagaacctcaggaagcttcgcagtcctgcctcgtgcctgcttgaacagctggatgtgggcaggaggctgtgggagcgggccatgccagcagaatcccgccttactctggggacttactcttgtcacagcccctggtgtcctgagggtcatttcagtgtcatggaaccctactctggaaactgtcagtcccagggcactggggagggctgaggccgaccatgcccagcctgctgctgctgttcacggctgctctgctgtccagctgggctcagcttctgacagacgccaactcctggtggtcattagctttgaacccggtgcagagacccgagatgtttatcatcggtgcccagcccgtgtgcagtcagcttcccgggctctcccctggccagaggaagctgtgccaattgtaccaggagcacatggcctacataggggagggagccaagactggcatcaaggaatgccagcaccagttccggcagcggcggtggaattgcagcacagcggacaacgcatctgtctttgggagagtcatgcagataggcagccgagagaccgccttcacccacgcggtgagcgccgcgggcgtggtcaacgccatcagccgggcctgcagcgagggcgagctctccacctgcggctgcagccggacggcgcggcccaaggacctgccccgggactggctgtggggcggctgtggggacaacgtggagtacggctaccgcttcgccaaggagtttgtggatgcccgggagcgagagaagaactttgccaaaggatcagaggagcagggccgggtgctcatgaacctgcaaaacaacgaggccggtcgcagggctgtgtataagatggcagacgtagcctgcaaatgccacggcgtctcggggtcctgcagcctcaagacctgctggctgcagctggccgagttccgcaaggtcggggaccggctgaaggagaagtacgacagcgcggccgccatgcgcgtcacccgcaagggccggctggagctggtcaacagccgcttcacccagcccaccccggaggacctggtctatgtggaccccagccccgactactgcctgcgcaacgagagcacgggctccctgggcacgcagggccgcctctgcaacaagacctcggagggcatggatggctgtgagctcatgtgctgcgggcgtggctacaaccagttcaagagcgtgcaggtggagcgctgccactgcaagttccactggtgctgcttcgtcaggtgtaagaagtgcacggagatcgtggaccagtacatctgtaaatagcccggagggcctgctcccggcccccctgcactctgcctcacaaaggtctatattatataaatctatataaatctattttatatttgtataagtaaatgggtgggtgctatacaat

SEQ ID NO: 81 - DNA, 2184 bp, homo sapien
tattcttccaaatggaaactgctaatttttgaagcagaaggttgacagcttcagtaagatctcaagagagcgagaagactggaatcagggaaccctactctggaaactgtcagtcccagggcactggggagggctgaggccgaccatgcccagcctgctgctgctgttcacggctgctctgctgtccagctgggctcagcttctgacagacgccaactcctggtggtcattagctttgaacccggtgcagagacccgagatgtttatcatcggtgcccagcccgtgtgcagtcagcttcccgggctctcccctggccagaggaagctgtgccaattgtaccaggagcacatggcctacataggggagggagccaagactggcatcaaggaatgccagcaccagttccggcagcggcggtggaattgcagcacagcggacaacgcatctgtctttgggagagtcatgcagataggcagccgagagaccgccttcacccacgcggtgagcgccgcgggcgtggtcaacgccatcagccgggcctgcagcgagggcgagctctccacctgcggctgcagccggacggcgcggcccaaggacctgccccgggactggctgtggggcggctgtggggacaacgtggagtacggctaccgcttcgccaaggagtttgtggatgcccgggagcgagagaagaactttgccaaaggatcagaggagcagggccgggtgctcatgaacctgcaaaacaacgaggccggtcgcagggctgtgtataagatggcagacgtagcctgcaaatgccacggcgtctcggggtcctgcagcctcaagacctgctggctgcagctggccgagttccgcaaggtcggggaccggctgaaggagaagtacgacagcgcggccgccatgcgcgtcacccgcaagggccggctggagctggtcaacagccgcttcacccagcccaccccggaggacctggtctatgtggaccccagccccgactactgcctgcgcaacgagagcacgggctccctgggcacgcagggccgcctctgcaacaagacctcggagggcatggatggctgtgagctcatgtgctgcgggcgtggctacaaccagttcaagagcgtgcaggtggagcgctgccactgcaagttccactggtgctgcttcgtcaggtgtaagaagtgcacggagatcgtggaccagtacatctgtaaatagcccggagggcctgctcccggcccccctgcactctgcctcacaaaggtctatattatataaatctatataaatctattttatatttgtataagtaaatgggtgggtgctatacaatggaaagatgaaaatggaaaggaagagcttatttaagagacgctggagatctctgaggagtggactttgctggttctctcctcttggtgggtgggagacagggctttttctctccctctggcgaggactctcaggatgtagggacttggaaatatttactgtctgtccaccacggcctggaggagggaggttgtggttggatggaggagatgatcttgtctggaagtctagagtctttgttggttagaggactgcctgtgatcctggccactaggccaagaggccctatgaaggtggcgggaactcagcttcaacctcgatgtcttcagggtcttgtccagaatgtagatgggttccgtaagaggcctggtgctctcttactctttcatccacgtgcacttgtgcggcatctgcagtttacaggaacggctccttccctaaaatgagaagtccaaggtcatctctggcccagtgaccacagagagatctgcacctcccggacttcaggcctgcctttccagcgagaattcttcatcctccacggttcactagctcctacctgaagaggaaagggggccatttgacctgacatgtcaggaaagccctaaactgaatgtttgcgcctgggctgcagaagccagggtgcatgaccaggctgcgtggacgttatactgtcttcccccacccccggggaggggaagcttgagctgctgctgtcactcctccaccgagggaggcctcacaaaccacaggacgctgcaacgggtcaggctggcgggcccggcgtgctcatcatctctgccccaggtgtacggtttctctctgacattaaatgcccttcatgg

SEQ ID NO: 82 - DNA, 2238 bp, homo sapien
agtcacagccacagtgaccattagcaggcacccaggcctgtctttggctcggaaacggtggcccccaatgtagcctagtttgaacctaggaactgcaggaccagagagattccactggagcctgatggacgggtgacagagggaaccctactctggaaactgtcagtcccagggcactggggagggctgaggccgaccatgcccagcctgctgctgctgttcacggctgctctgctgtccagctgggctcagcttctgacagacgccaactcctggtggtcattagctttgaacccggtgcagagacccgagatgtttatcatcggtgcccagcccgtgtgcagtcagcttcccgggctctcccctggccagaggaagctgtgccaattgtaccaggagcacatggcctacataggggagggagccaagactggcatcaaggaatgccagcaccagttccggcagcggcggtggaattgcagcacagcggacaacgcatctgtctttgggagagtcatgcagataggcagccgagagaccgccttcacccacgcggtgagcgccgcgggcgtggtcaacgccatcagccgggcctgcagcgagggcgagctctccacctgcggctgcagccggacggcgcggcccaaggacctgccccgggactggctgtggggcggctgtggggacaacgtggagtacggctaccgcttcgccaaggagtttgtggatgcccgggagcgagagaagaactttgccaaaggatcagaggagcagggccgggtgctcatgaacctgcaaaacaacgaggccggtcgcagggctgtgtataagatggcagacgtagcctgcaaatgccacggcgtctcggggtcctgcagcctcaagacctgctggctgcagctggccgagttccgcaaggtcggggaccggctgaaggagaagtacgacagcgcggccgccatgcgcgtcacccgcaagggccggctggagctggtcaacagccgcttcacccagcccaccccggaggacctggtctatgtggaccccagccccgactactgcctgcgcaacgagagcacgggctccctgggcacgcagggccgcctctgcaacaagacctcggagggcatggatggctgtgagctcatgtgctgcgggcgtggctacaaccagttcaagagcgtgcaggtggagcgctgccactgcaagttccactggtgctgcttcgtcaggtgtaagaagtgcacggagatcgtggaccagtacatctgtaaatagcccggagggcctgctcccggcccccctgcactctgcctcacaaaggtctatattatataaatctatataaatctattttatatttgtataagtaaatgggtgggtgctatacaatggaaagatgaaaatggaaaggaagagcttatttaagagacgctggagatctctgaggagtggactttgctggttctctcctcttggtgggtgggagacagggctttttctctccctctggcgaggactctcaggatgtagggacttggaaatatttactgtctgtccaccacggcctggaggagggaggttgtggttggatggaggagatgatcttgtctggaagtctagagtctttgttggttagaggactgcctgtgatcctggccactaggccaagaggccctatgaaggtggcgggaactcagcttcaacctcgatgtcttcagggtcttgtccagaatgtagatgggttccgtaagaggcctggtgctctcttactctttcatccacgtgcacttgtgcggcatctgcagtttacaggaacggctccttccctaaaatgagaagtccaaggtcatctctggcccagtgaccacagagagatctgcacctcccggacttcaggcctgcctttccagcgagaattcttcatcctccacggttcactagctcctacctgaagaggaaagggggccatttgacctgacatgtcaggaaagccctaaactgaatgtttgcgcctgggctgcagaagccagggtgcatgaccaggctgcgtggacgttatactgtcttcccccacccccggggaggggaagcttgagctgctgctgtcactcctccaccgagggaggcctcacaaaccacaggacgctgcaacgggtcaggctggcgggcccggcgtgctcatcatctctgccccaggtgtacggtttctctctgacattaaatgcccttcatgga

SEQ ID NO: 83 - DNA, 2190 bp, homo sapien
tattcttccaaatggaaactgctaatttttgaagcagaaggttgacagcttcagtaagatctcaagagagcgagaagactggaatcagggaaccctactctggaaactgtcagtcccagggcactggggagggctgaggccgaccatgcccagcctgctgctgctgttcacggctgctctgctgtccagctgggctcagcttctgacagacgccaactcctggtggtctttagctttgaacccggtgcagagacccgagatgtttatcatcggtgcccagcccgtgtgcagtcagcttcccgggctctcccctggccagaggaagctgtgccaattgtaccaggagcacatggcctacataagggagggagccaagactggcatcaaggaatgccagcaccagtttccgcagcggcggtggaagtgcagcacagcggacaacgcatctgtctttgggagagtcatgcagataggcagccgagagaccgccttcacccacgcggtgagcgccgcgggcgtggtcaacgccatcagccgggcctgcagcgagggagagctctccacctgcggctgcagccggacggcgcggcccaaggacctgccccgggactggctgtggggcggctgtggggacaacgtggagtacggctaccgctttgccaaggagtttgtggatgcccgggagcgagagaagaactttgccaagggatcagaggagcagggccgggtgctcatgaacctgcaaaacaacgaggccggtcgcagggctgtgtataagatggcagacgtagcctgcaaatgtcacggagtctctcggtcatgcaggctcaagacctgctggctgcagctggccgagttccgcaaggtcggggaccggctgaaggagaagtacgacagcgcggccgccatgcgcgtcacccgcaagggccggctggagctggtcaacagccgcttcacccagcccaccccggaggacctggtctatgtggaccccagccccgactactgcctgcgcaacgagagcacgggctccctgggcacgcagggccgcctctgcaacaagacctcggagggcatggatggctgtgagctcatgtgctgcgggcgtggctacaaccagttcaagagcgtgcaggtggagcgctgccactgcaagttccactggtgctgcttcgtcaggtgtaagaagtgcacggagatcgtggaccagtacatctgtaaataaccggaggctgcttcccgggccccccttgcactctgcctcacaaaggtctatattatataaatctatattaaatctattttaatatttgttataagtaaatgggtgggtgctatacaatggaaagatggaaatggaaagggaagagcttatttaagagacgctggagatctctgaggagtggactttgctggttctctcctcttggtgggtgggagacagggctttttctctccctctggtgaggactctcaggatgtagggacttggaaatatttactgtctgtccaccacggcctggaggagggaggttgtggttggatggaggagatgatcttgtctggaagtctagagtctttgttggttagaggactgcctgtgatcctggccactagccaagaggccctatgaaggtggcgggaactcagcttcaacctcgatgtcttcagggtcttgtccagaatgtagatgggttccgtaagaggcctggtgctctcttactctttcatccacgtgcacttgtgcggcatctgcagtttacaggaacggctccttccctaaaatgagaagtccaaggtcatctctggcccagtgaccacagagagatctgcacctcccggacttcaggcctgcctttccagcgagaattcttcatcctccacggttcactagctcctacctgaagaggaaagggggccatttgacctgacatgtcaggaaagccctaaactgaatgtttgcgcctgggctgcagaagccagggtgcatgaccaggctgcgtggacgttatactgtcttcccccacccccggggaggggaagcttgagctgctgctgtcactcctccaccgagggaggcctcacaaaccacaggacgctgcaacgggtcaggctggcgggcccggcgtgctcatcatctctgccccaggtgtacggtttctctctgacatttaaatgcccttcatgggg

SEQ ID NO: 84 - DNA, 2252 bp, homo sapien
gaccattagcaggcacccaggcctgtctttggctcggaaacggtggcccccaatgtagcctagtttgaacctaggaactgcaggaccagagagattccactggagcctgatggacgggtgacagagggaaccctactctggaaactgtcagtcccagggcactggggagggctgaggccgaccatgcccagcctgctgctgctgttcacggctgctctgctgtccagctgggctcagcttctgacagacgccaactcctggtggtcattagctttgaacccggtgcagagacccgagatgtttatcatcggtgcccagcccgtgtgcagtcagcttcccgggctctcccctggccagaggaagctgtgccaattgtaccaggagcacatggcctacataggggagggagccaagactggcatcaaggaatgccagcaccagttccggcagcggcggtggaattgcagcacagcggacaacgcatctgtctttgggagagtcatgcagataggcagccgagagaccgccttcacccacgcggtgagcgccgcgggcgtggtcaacgccatcagccgggcctgcagcgagggcgagctctccacctgcggctgcagccggacggcgcggcccaaggacctgccccgggactggctgtggggcggctgtggggacaacgtggagtacggctaccgcttcgccaaggagtttgtggatgcccgggagcgagagaagaactttgccaaaggatcagaggagcagggccgggtgctcatgaacctgcaaaacaacgaggccggtcgcagggctgtgtataagatggcagacgtagcctgcaaatgccacggcgtctcggggtcctgcagcctcaagacctgctggctgcagctggccgagttccgcaaggtcggggaccggctgaaggagaagtacgacagcgcggccgccatgcgcgtcacccgcaagggccggctggagctggtcaacagccgcttcacccagcccaccccggaggacctggtctatgtggaccccagccccgactactgcctgcgcaacgagagcacgggctccctgggcacgcagggccgcctctgcaacaagacctcggagggcatggatggctgtgagctcatgtgctgcgggcgtggctacaaccagttcaagagcgtgcaggtggagcgctgccactgcaagttccactggtgctgcttcgtcaggtgtaagaagtgcacggagatcgtggaccagtacatctgtaaatagcccggagggcctgctcccggccccccctgcactctgcctcacaaaggtctatattatataaatctatataaatctattttatatttgtataagtaaatgggtgggtgctatacaatggaaagatgaaaatggaaaggaagagcttatttaagagacgctggagatctctgaggagtggactttgctggttctctcctcttggtgggtgggagacagggctttttctctccctctggcgaggactctcaggatgtagggacttggaaatatttactgtctgtccaccacggcctggaggagggaggttgtggttggatggaggagatgatcttgtctggaagtctagagtctttgttggttagaggactgcctgtgatcctggccactaggccaagaggccctatgaaggtggcgggaactcagcttcaacctcgatgtcttcagggtcttgtccagaatgtagatgggttccgtaagaggcctggtgctctcttactctttcatccacgtgcacttgtgcggcatctgcagtttacaggaacggctccttccctaaaatgagaagtccaaggtcatctctggcccagtgaccacagagagatctgcacctcccggacttcaggcctgcctttccagcgagaattcttcatcctccacggttcactagctcctacctgaagaggaaagggggccatttgacctgacatgtcaggaaagccctaaactgaatgtttgcgcctgggctgcagaagccagggtgcatgaccaggctgcgtggacgttatactgtcttcccccacccccggggaggggaagcttgagctgctgctgtcactcctccaccgagggaggcctcacaaaccacaggacgctgcaacgggtcaggctggcgggcccggcgtgctcatcatctctgccccaggtgtacggtttctctctgacattaaatgcccttcatggaaaaaaaaaaaagaaaaaaaaaaaaaaaa

SEQ ID NO: 85 - DNA, 1304 bp, homo sapien
caattcaccaaaatgttttaatcctacaaaggagagcctgagggtcagagaaataagtctctgggctggaatgagaggtaggcacgtgggggagtggataggatgggccccatttctttggatgttctgcagcaaggacaggtatgctttacaacagccgaagtggcctcccggctgccgaacggaggaacgccgcaagctccgctcttgaaattacttgttttcatttctctttgtggtttctcagctcattatttctttggaaattaggtcctgtgcagggttcccacagtttggggtaagagacagaagtcctagggtgggaagatgagcagtgggaggcggaggctggaaagaggccgagcttctttgtggggaacacgcagcacgtaagcatcagtgcaactttctccgcctcaccccggctcctggtctgcccttatccgctgagtttccacactgactctccatttctgttttctccagggaaccctactctggaaactgtcagtcccagggcactggggagggctgaggccgaccatgcccagcctgctgctgctgttcacggctgctctgctgtccagctgggctcagcttctgacagacgccaactcctggtggtcattagctttgaacccggtgcagagacccgagatgtttatcatcggtgcccagcccgtgtgcagtcagcttcccgggctctcccctggccagaggaagctgtgccaattgtaccaggagcacatggcctacataggggagggagccaagactggcatcaaggaatgccagcaccagttccggcagcggcggtggaattgcagcacagcggacaacgcatctgtctttgggagagtcatgcagataggcagccgagagaccgccttcacccacgcggtgagcgccgcgggcgtggtcaacgccatcagccgggcctgcagcgagggcgagctctccacctgcggctgcagccggacggcgcggcccaaggacctgccccgggactggctgtggggcggctgtggggacaacgtggagtacggctaccgcttcgccaaggagtttgtggatgcccgggagcgagagaagaactttgccaaaggatcagaggagcagggccgggtgctcatgaacctgcaaaacaacgaggccggtcgcagggctgtgtataagatggcagacgtagcctgcaaatgccacggcgtctcggggtcctgcagcctcaagacctgctggctgcagctggccgagttccgcaaggtcggggaccggctgaaggagaagtacgacagcgcggccgc

SEQ ID NO: 86 - DNA, 1560 bp, homo sapien
cgaccatgcccagcctgctgctgctgttcacggctgctctgctgtccagctgggctcagcttctgacagacgccaactcctggtggtcattagctttgaacccggtgcagagacccgagatgtttatcatcggtgcccagcccgtgtgcagtcagcttcccgggctctcccctggccagaggaagctgtgccaattgtaccaggagcacatggcctacataggggagggagccaagactggcatcaaggaatgccagcaccagttccggcagcggcggtggaattgcagcacagcggacaacgcatctgtctttgggagagtcatgcagataggcagccgagagaccgccttcacccacgcggtgagcgccgcgggcgtggtcaacgccatcagccgggcctgcagcgagggcgagctctccacctgcggctgcagccggacggcgcggcccaaggacctgccccgggactggctgtggggcggctgtggggacaacgtggagtacggctaccgcttcgccaaggagtttgtggatgcccgggagcgagagaagaactttgccaaaggatcagaggagcagggccgggtgctcatgaacctgcaaaacaacgaggccggtcgcagggctgtgtataagatggcagacgtagcctgcaaatgccacggcgtctcggggtcctgcagcctcaagacctgctggctgcagctggccgagttccgcaaggtcggggaccggctgaaggagaagtacgacagcgcggccgccatgcgcgtcacccgcaagggccggctggagctggtcaacagccgcttcacccagcccaccccggaggacctggtctatgtggaccccagccccgactactgcctgcgcaacgagagcacgggctccctgggcacgcagggccgcctctgcaacaagacctcggagggcatggatggctgtgagctcatgtgctgcgggcgtggctacaaccagttcaagagcgtgcaggtggagcgctgccactgcaagttccactggtgctgcttcgtcaggtgtaagaagtgcacggagatcgtggaccagtacatctgtaaatagcccggagggcctgctcccggcccccctgcactctgcctcacaaaggtctatattatataaatctatataaatctattttatatttgtataagtaaatgggtgggtgctatacaatggaaagatgaaaatggaaaggaagagcttatttaagagacgctggagatctctgaggagtggactttgctggttctctcctcttggtgggtgggagacagggctttttctctccctctggtgaggactctcaggatgtagggacttggaaatatttactgtctgtccaccacggcctggaggagggaggttgtggttggatggaggagatgatcttgtctggaagtctagagtctttgttggttagaggactgcctgtgatcctggccactaggccaagaggccctatgaaggtggcgggaactcagcttcaacctcgatgtcttcagggtcttgtccagaatgtagatgggttccgtaa

SEQ ID NO: 87 - DNA, 1435 bp, homo sapien
aaatgctccagatcctcagtgttcaagaacctcaggaagcttcgcagtcctgcctcgtgcctgcttgaacagctggatgtgggcaggaggctgtgggagcgggccatgccagcagaatcccgccttactctggggacttactcttgtcacagcccctggtgtcctgagggtcatttcagtgtcatggaaccctactctggaaactgtcagtcccagggcactggggagggctgaggccgaccatgcccagcctgctgctgctgttcacggctgctctgctgtccagctgggctcagcttctgacagacgccaactcctggtggtcattagctttgaacccggtgcagagacccgagatgtttatcatcggtgcccagcccgtgtgcagtcagcttcccgggctctcccctggccagaggaagctgtgccaattgtaccaggagcacatggcctacataggggagggagccaagactggcatcaaggaatgccagcaccagttccggcagcggcggtggaattgcagcacagcggacaacgcatctgtctttgggagagtcatgcagataggcagccgagagaccgccttcacccacgcggtgagcgccgcgggcgtggtcaacgccatcagccgggcctgccgcgagggcgagctctccacctgcggctgcagccggacggcgcggcccaaggacctgccccgggactggctgtggggcggctgtggggacaacgtggagtacggctaccgcttcgccaaggagtttgtggatgcccgggagcgagagaagaactttgccaaaggatcagaggagcagggccgggtgctcatgaacctgcaaaacaacgaggccggtcgcagggctgtgtataagatggcagacgtagcctgcaaatgccacggcgtctcggggtcctgcagcctcaagacctgctggctgcagctggccgagttccgcaaggtcggggaccggctgaaggagaagtacgacagcgcggccgccatgcgcgtcacccgcaagggccggctggagctggaacagccgcttcacccagcccaccccggaggacctggtctatgtggaccccagccccgactactgcctgcgcaacgagagcacgggctccctgggcacgcagggccgcctctgcaacaagacctcggagggcatggatggctgtgagctcatgtgctgcgggcgtggctacaaccagttcaagagcgtgcaggtggagcgctgccactgcaagttccactggtgctgcttcgtcaggtgtaagaagtgcacggagatcgtggaccagtacatctgtaaatagcccggagggcctgctcccggcccccctgcactctgcctcacaaaggtctatattatataaatctatataaatctattttatatttgtataagtaaatgggtgggtgctatacaat

SEQ ID NO: 88 - DNA, 2182 bp, homo sapien
tattcttccaaatggaaactgctaatttttgaagcagaaggttgacagcttcagtaagatctcaagagagcgagaagactggaatcagggaaccctactctggaaactgtcagtcccagggcactggggagggctgaggccgaccatgcccagcctgctgctgctgttcacggctgctctgctgtccagctgggctcagcttctgacagacgccaactcctggtggtcattagctttgaacccggtgcagagacccgagatgtttatcatcggtgcccagcccgtgtgcagtcagcttcccgggctctcccctggccagaggaagctgtgccaattgtaccaggagcacatggcctacataggggagggagccaagactggcatcaaggaatgccagcaccagttccggcagcggcggtggaattgcagcacagcggacaacgcatctgtctttgggagagtcatgcagataggcagccgagagaccgccttcacccacgcggtgagcgccgcgggcgtggtcaacgccatcagccgggcctgccgcgagggcgagctctccacctgcggctgcagccggacggcgcggcccaaggacctgccccgggactggctgtggggcggctgtggggacaacgtggagtacggctaccgcttcgccaaggagtttgtggatgcccgggagcgagagaagaactttgccaaaggatcagaggagcagggccgggtgctcatgaacctgcaaaacaacgaggccggtcgcagggctgtgtataagatggcagacgtagcctgcaaatgccacggcgtctcggggtcctgcagcctcaagacctgctggctgcagctggccgagttccgcaaggtcggggaccggctgaaggagaagtacgacagcgcggccgccatgcgcgtcacccgcaagggccggctggagctggaacagccgcttcacccagcccaccccggaggacctggtctatgtggaccccagccccgactactgcctgcgcaacgagagcacgggctccctgggcacgcagggccgcctctgcaacaagacctcggagggcatggatggctgtgagctcatgtgctgcgggcgtggctacaaccagttcaagagcgtgcaggtggagcgctgccactgcaagttccactggtgctgcttcgtcaggtgtaagaagtgcacggagatcgtggaccagtacatctgtaaatagcccggagggcctgctcccggcccccctgcactctgcctcacaaaggtctatattatataaatctatataaatctattttatatttgtataagtaaatgggtgggtgctatacaatggaaagatgaaaatggaaaggaagagcttatttaagagacgctggagatctctgaggagtggactttgctggttctctcctcttggtgggtgggagacagggctttttctctccctctggcgaggactctcaggatgtagggacttggaaatatttactgtctgtccaccacggcctggaggagggaggttgtggttggatggaggagatgatcttgtctggaagtctagagtctttgttggttagaggactgcctgtgatcctggccactaggccaagaggccctatgaaggtggcgggaactcagcttcaacctcgatgtcttcagggtcttgtccagaatgtagatgggttccgtaagaggcctggtgctctcttactctttcatccacgtgcacttgtgcggcatctgcagtttacaggaacggctccttccctaaaatgagaagtccaaggtcatctctggcccagtgaccacagagagatctgcacctcccggacttcaggcctgcctttccagcgagaattcttcatcctccacggttcactagctcctacctgaagaggaaagggggccatttgacctgacatgtcaggaaagccctaaactgaatgtttgcgcctgggctgcagaagccagggtgcatgaccaggctgcgtggacgttatactgtcttcccccacccccggggaggggaagcttgagctgctgctgtcactcctccaccgagggaggcctcacaaaccacaggacgctgcaacgggtcaggctggcgggcccggcgtgctcatcatctctgccccaggtgtacggtttctctctgacattaaatgcccttcatgg

SEQ ID NO: 89 - DNA, 2236 bp, homo sapien
agtcacagccacagtgaccattagcaggcacccaggcctgtctttggctcggaaacggtggcccccaatgtagcctagtttgaacctaggaactgcaggaccagagagattccactggagcctgatggacgggtgacagagggaaccctactctggaaactgtcagtcccagggcactggggagggctgaggccgaccatgcccagcctgctgctgctgttcacggctgctctgctgtccagctgggctcagcttctgacagacgccaactcctggtggtcattagctttgaacccggtgcagagacccgagatgtttatcatcggtgcccagcccgtgtgcagtcagcttcccgggctctcccctggccagaggaagctgtgccaattgtaccaggagcacatggcctacataggggagggagccaagactggcatcaaggaatgccagcaccagttccggcagcggcggtggaattgcagcacagcggacaacgcatctgtctttgggagagtcatgcagataggcagccgagagaccgccttcacccacgcggtgagcgccgcgggcgtggtcaacgccatcagccgggcctgccgcgagggcgagctctccacctgcggctgcagccggacggcgcggcccaaggacctgccccgggactggctgtggggcggctgtggggacaacgtggagtacggctaccgcttcgccaaggagtttgtggatgcccgggagcgagagaagaactttgccaaaggatcagaggagcagggccgggtgctcatgaacctgcaaaacaacgaggccggtcgcagggctgtgtataagatggcagacgtagcctgcaaatgccacggcgtctcggggtcctgcagcctcaagacctgctggctgcagctggccgagttccgcaaggtcggggaccggctgaaggagaagtacgacagcgcggccgccatgcgcgtcacccgcaagggccggctggagctggaacagccgcttcacccagcccaccccggaggacctggtctatgtggaccccagccccgactactgcctgcgcaacgagagcacgggctccctgggcacgcagggccgcctctgcaacaagacctcggagggcatggatggctgtgagctcatgtgctgcgggcgtggctacaaccagttcaagagcgtgcaggtggagcgctgccactgcaagttccactggtgctgcttcgtcaggtgtaagaagtgcacggagatcgtggaccagtacatctgtaaatagcccggagggcctgctcccggcccccctgcactctgcctcacaaaggtctatattatataaatctatataaatctattttatatttgtataagtaaatgggtgggtgctatacaatggaaagatgaaaatggaaaggaagagcttatttaagagacgctggagatctctgaggagtggactttgctggttctctcctcttggtgggtgggagacagggctttttctctccctctggcgaggactctcaggatgtagggacttggaaatatttactgtctgtccaccacggcctggaggagggaggttgtggttggatggaggagatgatcttgtctggaagtctagagtctttgttggttagaggactgcctgtgatcctggccactaggccaagaggccctatgaaggtggcgggaactcagcttcaacctcgatgtcttcagggtcttgtccagaatgtagatgggttccgtaagaggcctggtgctctcttactctttcatccacgtgcacttgtgcggcatctgcagtttacaggaacggctccttccctaaaatgagaagtccaaggtcatctctggcccagtgaccacagagagatctgcacctcccggacttcaggcctgcctttccagcgagaattcttcatcctccacggttcactagctcctacctgaagaggaaagggggccatttgacctgacatgtcaggaaagccctaaactgaatgtttgcgcctgggctgcagaagccagggtgcatgaccaggctgcgtggacgttatactgtcttcccccacccccggggaggggaagcttgagctgctgctgtcactcctccaccgagggaggcctcacaaaccacaggacgctgcaacgggtcaggctggcgggcccggcgtgctcatcatctctgccccaggtgtacggtttctctctgacattaaatgcccttcatgga

SEQ ID NO: 90 - DNA, 2188 bp, homo sapien
tattcttccaaatggaaactgctaatttttgaagcagaaggttgacagcttcagtaagatctcaagagagcgagaagactggaatcagggaaccctactctggaaactgtcagtcccagggcactggggagggctgaggccgaccatgcccagcctgctgctgctgttcacggctgctctgctgtccagctgggctcagcttctgacagacgccaactcctggtggtctttagctttgaacccggtgcagagacccgagatgtttatcatcggtgcccagcccgtgtgcagtcagcttcccgggctctcccctggccagaggaagctgtgccaattgtaccaggagcacatggcctacataagggagggagccaagactggcatcaaggaatgccagcaccagtttccgcagcggcggtggaagtgcagcacagcggacaacgcatctgtctttgggagagtcatgcagataggcagccgagagaccgccttcacccacgcggtgagcgccgcgggcgtggtcaacgccatcagccgggcctgccgcgagggagagctctccacctgcggctgcagccggacggcgcggcccaaggacctgccccgggactggctgtggggcggctgtggggacaacgtggagtacggctaccgctttgccaaggagtttgtggatgcccgggagcgagagaagaactttgccaagggatcagaggagcagggccgggtgctcatgaacctgcaaaacaacgaggccggtcgcagggctgtgtataagatggcagacgtagcctgcaaatgtcacggagtctctcggtcatgcaggctcaagacctgctggctgcagctggccgagttccgcaaggtcggggaccggctgaaggagaagtacgacagcgcggccgccatgcgcgtcacccgcaagggccggctggagctggaacagccgcttcacccagcccaccccggaggacctggtctatgtggaccccagccccgactactgcctgcgcaacgagagcacgggctccctgggcacgcagggccgcctctgcaacaagacctcggagggcatggatggctgtgagctcatgtgctgcgggcgtggctacaaccagttcaagagcgtgcaggtggagcgctgccactgcaagttccactggtgctgcttcgtcaggtgtaagaagtgcacggagatcgtggaccagtacatctgtaaataaccggaggctgcttcccgggccccccttgcactctgcctcacaaaggtctatattatataaatctatattaaatctattttaatatttgttataagtaaatgggtgggtgctatacaatggaaagatggaaatggaaagggaagagcttatttaagagacgctggagatctctgaggagtggactttgctggttctctcctcttggtgggtgggagacagggctttttctctccctctggtgaggactctcaggatgtagggacttggaaatatttactgtctgtccaccacggcctggaggagggaggttgtggttggatggaggagatgatcttgtctggaagtctagagtctttgttggttagaggactgcctgtgatcctggccactagccaagaggccctatgaaggtggcgggaactcagcttcaacctcgatgtcttcagggtcttgtccagaatgtagatgggttccgtaagaggcctggtgctctcttactctttcatccacgtgcacttgtgcggcatctgcagtttacaggaacggctccttccctaaaatgagaagtccaaggtcatctctggcccagtgaccacagagagatctgcacctcccggacttcaggcctgcctttccagcgagaattcttcatcctccacggttcactagctcctacctgaagaggaaagggggccatttgacctgacatgtcaggaaagccctaaactgaatgtttgcgcctgggctgcagaagccagggtgcatgaccaggctgcgtggacgttatactgtcttcccccacccccggggaggggaagcttgagctgctgctgtcactcctccaccgagggaggcctcacaaaccacaggacgctgcaacgggtcaggctggcgggcccggcgtgctcatcatctctgccccaggtgtacggtttctctctgacatttaaatgcccttcatgggg

SEQ ID NO: 91 - DNA, 2250 bp, homo sapien
gaccattagcaggcacccaggcctgtctttggctcggaaacggtggcccccaatgtagcctagtttgaacctaggaactgcaggaccagagagattccactggagcctgatggacgggtgacagagggaaccctactctggaaactgtcagtcccagggcactggggagggctgaggccgaccatgcccagcctgctgctgctgttcacggctgctctgctgtccagctgggctcagcttctgacagacgccaactcctggtggtcattagctttgaacccggtgcagagacccgagatgtttatcatcggtgcccagcccgtgtgcagtcagcttcccgggctctcccctggccagaggaagctgtgccaattgtaccaggagcacatggcctacataggggagggagccaagactggcatcaaggaatgccagcaccagttccggcagcggcggtggaattgcagcacagcggacaacgcatctgtctttgggagagtcatgcagataggcagccgagagaccgccttcacccacgcggtgagcgccgcgggcgtggtcaacgccatcagccgggcctgccgcgagggcgagctctccacctgcggctgcagccggacggcgcggcccaaggacctgccccgggactggctgtggggcggctgtggggacaacgtggagtacggctaccgcttcgccaaggagtttgtggatgcccgggagcgagagaagaactttgccaaaggatcagaggagcagggccgggtgctcatgaacctgcaaaacaacgaggccggtcgcagggctgtgtataagatggcagacgtagcctgcaaatgccacggcgtctcggggtcctgcagcctcaagacctgctggctgcagctggccgagttccgcaaggtcggggaccggctgaaggagaagtacgacagcgcggccgccatgcgcgtcacccgcaagggccggctggagctggaacagccgcttcacccagcccaccccggaggacctggtctatgtggaccccagccccgactactgcctgcgcaacgagagcacgggctccctgggcacgcagggccgcctctgcaacaagacctcggagggcatggatggctgtgagctcatgtgctgcgggcgtggctacaaccagttcaagagcgtgcaggtggagcgctgccactgcaagttccactggtgctgcttcgtcaggtgtaagaagtgcacggagatcgtggaccagtacatctgtaaatagcccggagggcctgctcccggccccccctgcactctgcctcacaaaggtctatattatataaatctatataaatctattttatatttgtataagtaaatgggtgggtgctatacaatggaaagatgaaaatggaaaggaagagcttatttaagagacgctggagatctctgaggagtggactttgctggttctctcctcttggtgggtgggagacagggctttttctctccctctggcgaggactctcaggatgtagggacttggaaatatttactgtctgtccaccacggcctggaggagggaggttgtggttggatggaggagatgatcttgtctggaagtctagagtctttgttggttagaggactgcctgtgatcctggccactaggccaagaggccctatgaaggtggcgggaactcagcttcaacctcgatgtcttcagggtcttgtccagaatgtagatgggttccgtaagaggcctggtgctctcttactctttcatccacgtgcacttgtgcggcatctgcagtttacaggaacggctccttccctaaaatgagaagtccaaggtcatctctggcccagtgaccacagagagatctgcacctcccggacttcaggcctgcctttccagcgagaattcttcatcctccacggttcactagctcctacctgaagaggaaagggggccatttgacctgacatgtcaggaaagccctaaactgaatgtttgcgcctgggctgcagaagccagggtgcatgaccaggctgcgtggacgttatactgtcttcccccacccccggggaggggaagcttgagctgctgctgtcactcctccaccgagggaggcctcacaaaccacaggacgctgcaacgggtcaggctggcgggcccggcgtgctcatcatctctgccccaggtgtacggtttctctctgacattaaatgcccttcatggaaaaaaaaaaaagaaaaaaaaaaaaaaaa

SEQ ID NO: 92 - DNA, 1558 bp, homo sapien
cgaccatgcccagcctgctgctgctgttcacggctgctctgctgtccagctgggctcagcttctgacagacgccaactcctggtggtcattagctttgaacccggtgcagagacccgagatgtttatcatcggtgcccagcccgtgtgcagtcagcttcccgggctctcccctggccagaggaagctgtgccaattgtaccaggagcacatggcctacataggggagggagccaagactggcatcaaggaatgccagcaccagttccggcagcggcggtggaattgcagcacagcggacaacgcatctgtctttgggagagtcatgcagataggcagccgagagaccgccttcacccacgcggtgagcgccgcgggcgtggtcaacgccatcagccgggcctgccgcgagggcgagctctccacctgcggctgcagccggacggcgcggcccaaggacctgccccgggactggctgtggggcggctgtggggacaacgtggagtacggctaccgcttcgccaaggagtttgtggatgcccgggagcgagagaagaactttgccaaaggatcagaggagcagggccgggtgctcatgaacctgcaaaacaacgaggccggtcgcagggctgtgtataagatggcagacgtagcctgcaaatgccacggcgtctcggggtcctgcagcctcaagacctgctggctgcagctggccgagttccgcaaggtcggggaccggctgaaggagaagtacgacagcgcggccgccatgcgcgtcacccgcaagggccggctggagctggaacagccgcttcacccagcccaccccggaggacctggtctatgtggaccccagccccgactactgcctgcgcaacgagagcacgggctccctgggcacgcagggccgcctctgcaacaagacctcggagggcatggatggctgtgagctcatgtgctgcgggcgtggctacaaccagttcaagagcgtgcaggtggagcgctgccactgcaagttccactggtgctgcttcgtcaggtgtaagaagtgcacggagatcgtggaccagtacatctgtaaatagcccggagggcctgctcccggcccccctgcactctgcctcacaaaggtctatattatataaatctatataaatctattttatatttgtataagtaaatgggtgggtgctatacaatggaaagatgaaaatggaaaggaagagcttatttaagagacgctggagatctctgaggagtggactttgctggttctctcctcttggtgggtgggagacagggctttttctctccctctggtgaggactctcaggatgtagggacttggaaatatttactgtctgtccaccacggcctggaggagggaggttgtggttggatggaggagatgatcttgtctggaagtctagagtctttgttggttagaggactgcctgtgatcctggccactaggccaagaggccctatgaaggtggcgggaactcagcttcaacctcgatgtcttcagggtcttgtccagaatgtagatgggttccgtaa

SEQ ID NO: 93 - protein, 359 aa, homo sapien
MPSLLLLFTAALLSSWAQLLTDANSWWSLALNPVQRPEMFIIGAQPVCSQLPGLSPGQRKLCQLYQEHMAYIGEGAKTGIKECQHQFRQRRWNCSTADNASVFGRVMQIGSRETAFTHAVSAAGVVNAISRACREGELSTCGCSRTARPKDLPRDWLWGGCGDNVEYGYRFAKEFVDAREREKNFAKGSEEQGRVLMNLQNNEAGRRAVYKMADVACKCHGVSGSCSLKTCWLQLAEFRKVGDRLKEKYDSAAAMRVTRKGRLELVNSRFTQPTPEDLVYVDPSPDYCLRNESTGSLGTQGRLCNKTSEGMDGCELMCCGRGYNQFKSVQVERCHCKFHWCCFVRCKKCTEIVDQYICK

SEQ ID NO: 94 - protein, 112 aa, homo sapien
MPSLLLLFTAALLSSWAQLLTDANSWWSLALNPVQRPEMFIIGAQPVCSQLPGLSPGQRKLCQLYQEHMAYIGEGAKTGIKECQHQFRQRRWNCSTADNASVFGRVMQIGCV

SEQ ID NO: 95 - protein, 284 aa, homo sapien
VSTLTLHFCFLQGTLLWKLSVPGHWGGLRPTMPSLLLLFTAALLSSWAQLLTDANSWWSLALNPVQRPEMFIIGAQPVCSQLPGLSPGQRKLCQLYQEHMAYIGEGAKTGIKECQHQFRQRRWNCSTADNASVFGRVMQIGSRETAFTHAVSAAGVVNAISRACREGELSTCGCSRTARPKDLPRDWLWGGCGDNVEYGYRFAKEFVDAREREKNFAKGSEEQGRVLMNLQNNEAGRRAVYKMADVACKCHGVSGSCSLKTCWLQLAEFRKVGDRLKEKYDSAA

SEQ ID NO: 96 - protein, 82 aa, homo sapien
MPSLLLLFTAALLSSWAQLLTDANSWWSLALNPVQRPEMFIIGAQPVCSQLPGLSPGQRKLCQLYQEHMAYIGEGAKTGIKE

SEQ ID NO: 97 - protein, 82 aa, homo sapien; identical to SEQ ID NO: 96

SEQ ID NO: 98 - protein, 113 aa, homo sapien
VSTLTLHFCFLQGTLLWKLSVPGHWGGLRPTMPSLLLLFTAALLSSWAQLLTDANSWWSLALNPVQRPEMFIIGAQPVCSQLPGLSPGQRKLCQLYQEHMAYIGEGAKTGIKE

SEQ ID NO: 99 - protein, 359 aa, homo sapien
MPSLLLLFTAALLSSWAQLLTDANSWWSLALNPVQRPEMFIIGAQPVCSQLPGLSPGQRKLCQLYQEHMAYIGEGAKTGIKECQHQFRQRRWNCSTADNASVFGRVMQIGSRETAFTHAVSAAGVVNAISRACCEGELSTCGCSRTARPKDLPRDWLWGGCGDNVEYGYRFAKEFVDAREREKNFAKGSEEQGRVLMNLQNNEAGRRAVYKMADVACKCHGVSGSCSLKTCWLQLAEFRKVGDRLKEKYDSAAAMRVTRKGRLELVNSRFTQPTPEDLVYVDPSPDYCLRNESTGSLGTQGRLCNKTSEGMDGCELMCCGRGYNQFKSVQVERCHCKFHWCCFVRCKKCTEIVDQYICK

SEQ ID NO: 100 - protein, 284 aa, homo sapien
VSTLTLHFCFLQGTLLWKLSVPGHWGGLRPTMPSLLLLFTAALLSSWAQLLTDANSWWSLALNPVQRPEMFIIGAQPVCSQLPGLSPGQRKLCQLYQEHMAYIGEGAKTGIKECQHQFRQRRWNCSTADNASVFGRVMQIGSRETAFTHAVSAAGVVNAISRACCEGELSTCGCSRTARPKDLPRDWLWGGCGDNVEYGYRFAKEFVDAREREKNFAKGSEEQGRVLMNLQNNEAGRRAVYKMADVACKCHGVSGSCSLKTCWLQLAEFRKVGDRLKEKYDSAA

SEQ ID NO: 101 - protein, 359 aa, homo sapien
MPSLLLLFTAALLSSWAQLLTDANSWWSLALNPVQRPEMFIIGAQPVCSQLPGLSPGQRKLCQLYQEHMAYIGEGAKTGIKECQHQFRQRRWNCSTADNASVFGRVMQIGSRETAFTHAVSAAGVVNAISRACSEGELSTCGCSRTARPKDLPRDWLWGGCGDNVEYGYRFAKEFVDAREREKNFAKGSEEQGRVLMNLQNNEAGRRAVYKMADVACKCHGVSGSCSLKTCWLQLAEFRKVGDRLKEKYDSAAAMRVTRKGRLELVNSRFTQPTPEDLVYVDPSPDYCLRNESTGSLGTQGRLCNKTSEGMDGCELMCCGRGYNQFKSVQVERCHCKFHWCCFVRCKKCTEIVDQYICK

SEQ ID NO: 102 - protein, 284 aa, homo sapien
VSTLTLHFCFLQGTLLWKLSVPGHWGGLRPTMPSLLLLFTAALLSSWAQLLTDANSWWSLALNPVQRPEMFIIGAQPVCSQLPGLSPGQRKLCQLYQEHMAYIGEGAKTGIKECQHQFRQRRWNCSTADNASVFGRVMQIGSRETAFTHAVSAAGVVNAISRACSEGELSTCGCSRTARPKDLPRDWLWGGCGDNVEYGYRFAKEFVDAREREKNFAKGSEEQGRVLMNLQNNEAGRRAVYKMADVACKCHGVSGSCSLKTCWLQLAEFRKVGDRLKEKYDSAA

SEQ ID NO: 103 - protein, 313 aa, homo sapien
MPSLLLLFTAALLSSWAQLLTDANSWWSLALNPVQRPEMFIIGAQPVCSQLPGLSPGQRKLCQLYQEHMAYIGEGAKTGIKECQHQFRQRRWNCSTADNASVFGRVMQIGSRETAFTHAVSAAGVVNAISRACREGELSTCGCSRTARPKDLPRDWLWGGCGDNVEYGYRFAKEFVDAREREKNFAKGSEEQGRVLMNLQNNEAGRRAVYKMADVACKCHGVSGSCSLKTCWLQLAEFRKVGDRLKEKYDSAAAMRVTRKGRLELEQPLHPAHPGGPGLCGPQPRLLPAQREHGLPGHAGPPLQQDLGGHGWL

SEQ ID NO: 104 - DNA, 21 bp, artificial sequence
  synthetic sequence; gRNA Recognition Sequence
aagaagtgcacggagatcgtg

SEQ ID NO: 105 - DNA, 21 bp, artificial sequence
  synthetic sequence; gRNA Recognition Sequence
aagcttgagctgctgctgtca

SEQ ID NO: 106 - DNA, 21 bp, artificial sequence
  synthetic sequence; gRNA Recognition Sequence
aaggaatgccagcaccagttc

SEQ ID NO: 107 - DNA, 21 bp, artificial sequence
  synthetic sequence; gRNA Recognition Sequence
aagttccactggtgctgcttc

SEQ ID NO: 108 - DNA, 21 bp, artificial sequence
  synthetic sequence; gRNA Recognition Sequence
aagtgcacggagatcgtggac

SEQ ID NO: 109 - DNA, 21 bp, artificial sequence
  synthetic sequence; gRNA Recognition Sequence
aagctgtgccaattgtaccag

SEQ ID NO: 110 - DNA, 21 bp, artificial sequence
  synthetic sequence; gRNA Recognition Sequence
aagactggcatcaaggaatgc

SEQ ID NO: 111 - DNA, 21 bp, artificial sequence
  synthetic sequence; gRNA Recognition Sequence
aagagacgctggagatctctg

SEQ ID NO: 112 - DNA, 21 bp, artificial sequence
  synthetic sequence; gRNA Recognition Sequence
aaggagaagtacgacagcgcg

SEQ ID NO: 113 - DNA, 21 bp, artificial sequence
  synthetic sequence; gRNA Recognition Sequence
aagtctagagtctttgttggt

SEQ ID NO: 114 - DNA, 21 bp, artificial sequence
  synthetic sequence; gRNA Recognition Sequence
gtgcagagacccgagatgttt

SEQ ID NO: 115 - DNA, 21 bp, artificial sequence
  synthetic sequence; gRNA Recognition Sequence
gaagctgtgccaattgtacca

SEQ ID NO: 116 - DNA, 21 bp, artificial sequence
  synthetic sequence; gRNA Recognition Sequence
gtgctgcttcgtcaggtgtaa

SEQ ID NO: 117 - DNA, 21 bp, artificial sequence
  synthetic sequence; gRNA Recognition Sequence
gctgcgtggacgttatactgt

SEQ ID NO: 118 - DNA, 19 bp, artificial sequence
  synthetic sequence; gRNA Recognition Sequence
accctactctggaaactgt

SEQ ID NO: 119 - DNA, 19 bp, artificial sequence
  synthetic sequence; gRNA Recognition Sequence
agaggaagctgtgccaatt

SEQ ID NO: 120 - DNA, 19 bp, artificial sequence
  synthetic sequence; gRNA Recognition Sequence
ggaggagatgatcttgtct

SEQ ID NO: 121 - DNA, 19 bp, artificial sequence
  synthetic sequence; gRNA Recognition Sequence
gcttcaacctcgatgtctt

SEQ ID NO: 122 - DNA, 19 bp, artificial sequence
  synthetic sequence; gRNA Recognition Sequence
gcgagaattcttcatcctc

SEQ ID NO: 123 - DNA, 19 bp, artificial sequence
  synthetic sequence; gRNA Recognition Sequence
gagagaagaactttgccaa

1. A method of treating a subject having decreased bone mineral density or at risk of developing decreased bone mineral density, having osteopenia or at risk of developing osteopenia, having Type I osteoporosis or at risk of developing Type I osteoporosis, having Type II osteoporosis or at risk of developing Type II osteoporosis, or having secondary osteoporosis or at risk of developing secondary osteoporosis, the method comprising administering a Wnt Family Member 5B inhibitor to the subject.

2-5. (canceled)

6. The method according to claim 1, wherein the WNT5B inhibitor comprises an inhibitory nucleic acid molecule.

7. The method according to claim 6, wherein the inhibitory nucleic acid molecule comprises an antisense nucleic acid molecule, a small interfering RNA (siRNA), or a short hairpin RNA (shRNA) that hybridizes to a WNT5B nucleic acid molecule.

8-14. (canceled)

15. The method according to claim 1, further comprising detecting the presence or absence of a WNT5B variant nucleic acid molecule encoding a WNT5B predicted loss-of-function polypeptide in a biological sample obtained from the subject.

16. The method according to claim 15, further comprising administering a therapeutic agent that treats or prevents decreased bone mineral density in a standard dosage amount to a subject wherein the WNT5B variant nucleic acid molecule is absent from the biological sample.

17. The method according to claim 15, further comprising administering a therapeutic agent that treats or prevents decreased bone mineral density in a dosage amount that is the same as or less than a standard dosage amount to a subject that is heterozygous for the WNT5B variant nucleic acid molecule.

18. The method according to claim 15, wherein the WNT5B variant nucleic acid molecule encodes Cys83Stop-LG, Cys83Stop-Sht, Cys114Stop, Arg134Cys-LG, Arg134Cys-Sht, Arg134Ser-LG, Arg134Ser-Sht, or Val266fs.

19. (canceled)

20. The method according to claim 18, wherein the WNT5B variant nucleic acid molecule is:
a genomic nucleic acid molecule having a nucleotide sequence comprising: a thymine at a position corresponding to position 56,698 according to SEQ ID NO:2; an adenine at a position corresponding to position 58,170 according to SEQ ID NO:3; a thymine at a position corresponding to position 65,099 according to SEQ ID NO:4; an adenine at a position corresponding to position 65,099 according to SEQ ID NO:5; or a deletion of a TC dinucleotide at positions corresponding to positions 71,313-71,314 according to SEQ ID NO:6;
an mRNA molecule having a nucleotide sequence comprising: a uracil at a position corresponding to position 242 according to SEQ ID NO:15; a uracil at a position corresponding to position 145 according to SEQ ID NO:16; a uracil at a position corresponding to position 198 according to SEQ ID NO:17; a uracil at a position corresponding to position 40 according to SEQ ID NO:18; a uracil at a position corresponding to position 145 according to SEQ ID NO:19; a uracil at a position corresponding to position 183 according to SEQ ID NO:20; a uracil at a position corresponding to position 543 according to SEQ ID NO:21; an adenine at a position corresponding to position 491 according to SEQ ID NO:22; an adenine at a position corresponding to position 394 according to SEQ ID NO:23; an adenine at a position corresponding to position 447 according to SEQ ID NO:24; an adenine at a position corresponding to position 289 according to SEQ ID NO:25; an adenine at a position corresponding to position 394 according to SEQ ID NO:26; an adenine at a position corresponding to position 432 according to SEQ ID NO:27; an adenine at a position corresponding to position 792 according to SEQ ID NO:28; an adenine at a position corresponding to position 254 according to SEQ ID NO:29; a uracil at a position corresponding to position 642 according to SEQ ID NO:30; a uracil at a position corresponding to position 545 according to SEQ ID NO:31; a uracil at a position corresponding to position 598 according to SEQ ID NO:32; a uracil at a position corresponding to position 545 according to SEQ ID NO:33; a uracil at a position corresponding to position 583 according to SEQ ID NO:34; a uracil at a position corresponding to position 943 according to SEQ ID NO:35; a uracil at a position corresponding to position 405 according to SEQ ID NO:36; an adenine at a position corresponding to position 642 according to SEQ ID NO:37; an adenine at a position corresponding to position 545 according to SEQ ID NO:38; an adenine at a position corresponding to position 598 according to SEQ ID NO:39; an adenine at a position corresponding to position 545 according to SEQ ID NO:40; an adenine at a position corresponding to position 583 according to SEQ ID NO:41; an adenine at a position corresponding to position 943 according to SEQ ID NO:42; an adenine at a position corresponding to position 405 according to SEQ ID NO:43; a deletion of a UC dinucleotide at positions corresponding to positions 1,039-1,040 according to SEQ ID NO:44; a deletion of a UC dinucleotide at positions corresponding to positions 942-943 according to SEQ ID NO:45; a deletion of a UC dinucleotide at positions corresponding to positions 995-996 according to SEQ ID NO:46; a deletion of a UC dinucleotide at positions corresponding to positions 942-943 according to SEQ ID NO:47; a deletion of a UC dinucleotide at positions corresponding to positions 980-981 according to SEQ ID NO:48; or a deletion of a UC dinucleotide at positions corresponding to positions 802-803 according to SEQ ID NO:49; or
a cDNA molecule having a nucleotide sequence comprising: a thymine at a position corresponding to position 242 according to SEQ ID NO:58; a thymine at a position corresponding to position 145 according to SEQ ID NO:59; a thymine at a position corresponding to position 198 according to SEQ ID NO:60; a thymine at a position corresponding to position 40 according to SEQ ID NO:61; a thymine at a position corresponding to position 145 according to SEQ ID NO:62; a thymine at a position corresponding to position 183 according to SEQ ID NO:63; a thymine at a position corresponding to position 543 according to SEQ ID NO:64; an adenine at a position corresponding to position 491 according to SEQ ID NO:65; an adenine at a position corresponding to position 394 according to SEQ ID NO:66; an adenine at a position corresponding to position 447 according to SEQ ID NO:67; an adenine at a position corresponding to position 289 according to SEQ ID NO:68; an adenine at a position corresponding to position 394 according to SEQ ID NO:69; an adenine at a position corresponding to position 432 according to SEQ ID NO:70; an adenine at a position corresponding to position 792 according to SEQ ID NO:71; an adenine at a position corresponding to position 254 according to SEQ ID NO:72; a thymine at a position corresponding to position 642 according to SEQ ID NO:73; a thymine at a position corresponding to position 545 according to SEQ ID NO:74; a thymine at a position corresponding to position 598 according to SEQ ID NO:75; a thymine at a position corresponding to position 545 according to SEQ ID NO:76; a thymine at a position corresponding to position 583 according to SEQ ID NO:77; a thymine at a position corresponding to position 943 according to SEQ ID NO:78; a thymine at a position corresponding to position 405 according to SEQ ID NO:79; an adenine at a position corresponding to position 545 according to SEQ ID NO:81; an adenine at a position corresponding to position 598 according to SEQ ID NO:82; an adenine at a position corresponding to position 545 according to SEQ ID NO:83; an adenine at a position corresponding to position 583 according to SEQ ID NO:84; an adenine at a position corresponding to position 943 according to SEQ ID NO:85; an adenine at a position corresponding to position 405 according to SEQ ID NO:86; a deletion of a TC dinucleotide at positions corresponding to positions 942-943 according to SEQ ID NO:88; a deletion of a TC dinucleotide at positions corresponding to positions 995-996 according to SEQ ID NO:89; a deletion of a TC dinucleotide at positions corresponding to positions 942-943 according to SEQ ID NO:90; a deletion of a TC dinucleotide at positions corresponding to positions 980-981 according to SEQ ID NO:91; or a deletion of a TC dinucleotide at positions corresponding to positions 802-803 according to SEQ ID NO:92.

21-35. (canceled)

36. A method of treating a subject with a therapeutic agent that treats or prevents decreased bone mineral density, wherein the subject has decreased bone mineral density or is at risk of developing decreased bone mineral density, the method comprising:
determining whether the subject has a Wnt Family Member 5B (WNT5B) variant nucleic acid molecule encoding a WNT5B predicted loss-of-function polypeptide by:
obtaining or having obtained a biological sample from the subject; and
performing or having performed a sequence analysis on the biological sample to determine if the subject has a genotype comprising the WNT5B variant nucleic acid molecule encoding the WNT5B predicted loss-of-function polypeptide; and
administering or continuing to administer the therapeutic agent that treats or prevents decreased bone mineral density in a standard dosage amount to a subject that is WNT5B reference, and/or administering a WNT5B inhibitor to the subject; and
administering or continuing to administer the therapeutic agent that treats or prevents decreased bone mineral density in an amount that is the same as or less than a standard dosage amount to a subject that is heterozygous for the WNT5B variant nucleic acid molecule, and/or administering a WNT5B inhibitor to the subject;
wherein the presence of a genotype having the WNT5B variant nucleic acid molecule encoding the WNT5B predicted loss-of-function polypeptide indicates the subject has a reduced risk of developing decreased bone mineral density.

37. The method according to claim 36, wherein the subject is WNT5B reference, and the subject is administered or continued to be administered the therapeutic agent that treats or prevents decreased bone mineral density in a standard dosage amount, and is administered a WNT5B inhibitor.

38. The method according to claim 36, wherein the subject is heterozygous for a WNT5B variant nucleic acid molecule, and the subject is administered or continued to be administered the therapeutic agent that treats or prevents decreased bone mineral density in an amount that is the same as or less than a standard dosage amount, and is administered a WNT5B inhibitor.

39. The method according to claim 36, wherein the WNT5B variant nucleic acid molecule encodes Cys83Stop-LG, Cys83Stop-Sht, Cys114Stop, Arg134Cys-LG, Arg134Cys-Sht, Arg134Ser-LG, Arg134Ser-Sht, or Val266fs.

40. (canceled)

41. The method according to claim 39, wherein the WNT5B variant nucleic acid molecule is:
a genomic nucleic acid molecule having a nucleotide sequence comprising: a thymine at a position corresponding to position 56,698 according to SEQ ID NO:2, an adenine at a position corresponding to position 58,170 according to SEQ ID NO:3, a thymine at a position corresponding to position 65,099 according to SEQ ID NO:4, an adenine at a position corresponding to position 65,099 according to SEQ ID NO:5, or a deletion of a TC dinucleotide at positions corresponding to positions 71,313-71,314 according to SEQ ID NO:6;
an mRNA molecule having a nucleotide sequence comprising: a uracil at a position corresponding to position 242 according to SEQ ID NO:15, a uracil at a position corresponding to position 145 according to SEQ ID NO:16, a uracil at a position corresponding to position 198 according to SEQ ID NO:17, a uracil at a position corresponding to position 40 according to SEQ ID NO:18, a uracil at a position corresponding to position 145 according to SEQ ID NO:19, a uracil at a position corresponding to position 183 according to SEQ ID NO:20, a uracil at a position corresponding to position 543 according to SEQ ID NO:21, an adenine at a position corresponding to position 491 according to SEQ ID NO:22, an adenine at a position corresponding to position 394 according to SEQ ID NO:23, an adenine at a position corresponding to position 447 according to SEQ ID NO:24, an adenine at a position corresponding to position 289 according to SEQ ID NO:25, an adenine at a position corresponding to position 394 according to SEQ ID NO:26, an adenine at a position corresponding to position 432 according to SEQ ID NO:27, an adenine at a position corresponding to position 792 according to SEQ ID NO:28, an adenine at a position corresponding to position 254 according to SEQ ID NO:29, a uracil at a position corresponding to position 642 according to SEQ ID NO:30, a uracil at a position corresponding to position 545 according to SEQ ID NO:31, a uracil at a position corresponding to position 598 according to SEQ ID NO:32, a uracil at a position corresponding to position 545 according to SEQ ID NO:33, a uracil at a position corresponding to position 583 according to SEQ ID NO:34, a uracil at a position corresponding to position 943 according to SEQ ID NO:35, a uracil at a position corresponding to position 405 according to SEQ ID NO:36, an adenine at a position corresponding to position 642 according to SEQ ID NO:37, an adenine at a position corresponding to position 545 according to SEQ ID NO:38, an adenine at a position corresponding to position 598 according to SEQ ID NO:39, an adenine at a position corresponding to position 545 according to SEQ ID NO:40, an adenine at a position corresponding to position 583 according to SEQ ID NO:41, an adenine at a position corresponding to position 943 according to SEQ ID NO:42, an adenine at a position corresponding to position 405 according to SEQ ID NO:43, a deletion of a UC dinucleotide at positions corresponding to positions 1,039-1,040 according to SEQ ID NO:44, a deletion of a UC dinucleotide at positions corresponding to positions 942-943 according to SEQ ID NO:45, a deletion of a UC dinucleotide at positions corresponding to positions 995-996 according to SEQ ID NO:46, a deletion of a UC dinucleotide at positions corresponding to positions 942-943 according to SEQ ID NO:47, a deletion of a UC dinucleotide at positions corresponding to positions 980-981 according to SEQ ID NO:48, or a deletion of a UC dinucleotide at positions corresponding to positions 802-803 according to SEQ ID NO:49; or
a cDNA molecule produced from an mRNA molecule, wherein the cDNA molecule has a nucleotide sequence comprising: a thymine at a position corresponding to position 242 according to SEQ ID NO:58, a thymine at a position corresponding to position 145 according to SEQ ID NO:59, a thymine at a position corresponding to position 198 according to SEQ ID NO:60, a thymine at a position corresponding to position 40 according to SEQ ID NO:61, a thymine at a position corresponding to position 145 according to SEQ ID NO:62, a thymine at a position corresponding to position 183 according to SEQ ID NO:63, a thymine at a position corresponding to position 543 according to SEQ ID NO:64, an adenine at a position corresponding to position 491 according to SEQ ID NO:65, an adenine at a position corresponding to position 394 according to SEQ ID NO:66, an adenine at a position corresponding to position 447 according to SEQ ID NO:67, an adenine at a position corresponding to position 289 according to SEQ ID NO:68, an adenine at a position corresponding to position 394 according to SEQ ID NO:69, an adenine at a position corresponding to position 432 according to SEQ ID NO:70, an adenine at a position corresponding to position 792 according to SEQ ID NO:71, an adenine at a position corresponding to position 254 according to SEQ ID NO:72, a thymine at a position corresponding to position 642 according to SEQ ID NO:73, a thymine at a position corresponding to position 545 according to SEQ ID NO:74, a thymine at a position corresponding to position 598 according to SEQ ID NO:75, a thymine at a position corresponding to position 545 according to SEQ ID NO:76, a thymine at a position corresponding to position 583 according to SEQ ID NO:77, a thymine at a position corresponding to position 943 according to SEQ ID NO:78, a thymine at a position corresponding to position 405 according to SEQ ID NO:79, an adenine at a position corresponding to position 642 according to SEQ ID NO:80, an adenine at a position corresponding to position 545 according to SEQ ID NO:81, an adenine at a position corresponding to position 598 according to SEQ ID NO:82, an adenine at a position corresponding to position 545 according to SEQ ID NO:83, an adenine at a position corresponding to position 583 according to SEQ ID NO:84, an adenine at a position corresponding to position 943 according to SEQ ID NO:85, an adenine at a position corresponding to position 405 according to SEQ ID NO:86, a deletion of a TC dinucleotide at positions corresponding to positions 1,039-1,040 according to SEQ ID NO:87, a deletion of a TC dinucleotide at positions corresponding to positions 942-943 according to SEQ ID NO:88, a deletion of a TC dinucleotide at positions corresponding to positions 995-996 according to SEQ ID NO:89, a deletion of a TC dinucleotide at positions corresponding to positions 942-943 according to SEQ ID NO:90, a deletion of a TC dinucleotide at positions corresponding to positions 980-981 according to SEQ ID NO:91, or a deletion of a TC dinucleotide at positions corresponding to positions 802-803 according to SEQ ID NO:92.

42. The method according to claim 36, wherein the sequence analysis comprises sequencing at least a portion of the nucleotide sequence of the WNT5B genomic nucleic acid molecule, or the complement thereof, in the biological sample, wherein the sequenced portion comprises a position corresponding to: position 56,698 according to SEQ ID NO:2, or the complement thereof; position 58,170 according to SEQ ID NO:3, or the complement thereof; position 65,099 according to SEQ ID NO:4, or the complement thereof; position 65,099 according to SEQ ID NO:5, or the complement thereof; or positions 71,313-71,314 according to SEQ ID NO:6, or the complement thereof;
wherein when the sequenced portion of the WNT5B genomic nucleic acid molecule, or the complement thereof, in the biological sample comprises: a thymine at a position corresponding to position 56,698 according to SEQ ID NO:2, an adenine at a position corresponding to position 58,170 according to SEQ ID NO:3, a thymine at a position corresponding to position 65,099 according to SEQ ID NO:4, an adenine at a position corresponding to position 65,099 according to SEQ ID NO:5, or a deletion of a TC dinucleotide at positions corresponding to positions 71,313-71,314 according to SEQ ID NO:6; then the WNT5B genomic nucleic acid molecule in the biological sample is a WNT5B variant genomic nucleic acid molecule encoding a WNT5B predicted loss-of-function polypeptide.

43-56. (canceled)

57. The method according to claim 36, wherein the WNT5B inhibitor comprises an inhibitory nucleic acid molecule.

58. The method according to claim 57, wherein the inhibitory nucleic acid molecule comprises an antisense nucleic acid molecule, a small interfering RNA (siRNA), or a short hairpin RNA (shRNA) that hybridizes to a WNT5B nucleic acid molecule.

59-216. (canceled)
